United States Patent Application Publication US 2024/0229078 A1 - sequence listing, part 3

SEQ ID NO: 44278 - DNA, 20 bp, synthetic construct
  misc_feature 1..20: note = chemically synthesized
  source 1..20: mol_type = other DNA
gggcaggggagaaggggcgg

SEQ ID NO: 44279 - DNA, 20 bp, synthetic construct
  misc_feature 1..20: note = chemically synthesized
  source 1..20: mol_type = other DNA
gaaggggcggaggtattctc

SEQ ID NO: 44280 - DNA, 20 bp, synthetic construct
  misc_feature 1..20: note = chemically synthesized
  source 1..20: mol_type = other DNA
aaggggcggaggtattctcg

SEQ ID NO: 44281 - DNA, 20 bp, synthetic construct
  misc_feature 1..20: note = chemically synthesized
  source 1..20: mol_type = other DNA
gaggtattctcgaggcccat

SEQ ID NO: 44282 - DNA, 20 bp, synthetic construct
  misc_feature 1..20: note = chemically synthesized
  source 1..20: mol_type = other DNA
cgaggcccattggcgtcctt

SEQ ID NO: 44283 - DNA, 20 bp, synthetic construct
  misc_feature 1..20: note = chemically synthesized
  source 1..20: mol_type = other DNA
gaggcccattggcgtccttt

SEQ ID NO: 44284 - DNA, 20 bp, synthetic construct
  misc_feature 1..20: note = chemically synthesized
  source 1..20: mol_type = other DNA
cattggcgtcctttaggact

SEQ ID NO: 44285 - DNA, 20 bp, synthetic construct
  misc_feature 1..20: note = chemically synthesized
  source 1..20: mol_type = other DNA
attggcgtcctttaggactc

SEQ ID NO: 44286 - DNA, 20 bp, synthetic construct
  misc_feature 1..20: note = chemically synthesized
  source 1..20: mol_type = other DNA
ggcgtcctttaggactcagg

SEQ ID NO: 44287 - DNA, 20 bp, synthetic construct
  misc_feature 1..20: note = chemically synthesized
  source 1..20: mol_type = other DNA
gcgtcctttaggactcaggc

SEQ ID NO: 44288 - DNA, 20 bp, synthetic construct
  misc_feature 1..20: note = chemically synthesized
  source 1..20: mol_type = other DNA
cgtcctttaggactcaggca

SEQ ID NO: 44289 - DNA, 20 bp, synthetic construct
  misc_feature 1..20: note = chemically synthesized
  source 1..20: mol_type = other DNA
cctttaggactcaggcaggg

SEQ ID NO: 44290 - DNA, 20 bp, synthetic construct
  misc_feature 1..20: note = chemically synthesized
  source 1..20: mol_type = other DNA
ctttaggactcaggcaggga

SEQ ID NO: 44291 - DNA, 20 bp, synthetic construct
  misc_feature 1..20: note = chemically synthesized
  source 1..20: mol_type = other DNA
tttaggactcaggcagggaa

SEQ ID NO: 44292 - DNA, 20 bp, synthetic construct
  misc_feature 1..20: note = chemically synthesized
  source 1..20: mol_type = other DNA
ctcaggcagggaagggccct

SEQ ID NO: 44293 - DNA, 20 bp, synthetic construct
  misc_feature 1..20: note = chemically synthesized
  source 1..20: mol_type = other DNA
gggaagggcccttggtgctc

SEQ ID NO: 44294 - DNA, 20 bp, synthetic construct
  misc_feature 1..20: note = chemically synthesized
  source 1..20: mol_type = other DNA
gaagggcccttggtgctctg

SEQ ID NO: 44295 - DNA, 20 bp, synthetic construct
  misc_feature 1..20: note = chemically synthesized
  source 1..20: mol_type = other DNA
ggcccttggtgctctggagc

SEQ ID NO: 44296 - DNA, 20 bp, synthetic construct
  misc_feature 1..20: note = chemically synthesized
  source 1..20: mol_type = other DNA
cccttggtgctctggagccg

SEQ ID NO: 44297 - DNA, 20 bp, synthetic construct
  misc_feature 1..20: note = chemically synthesized
  source 1..20: mol_type = other DNA
ccttggtgctctggagccgg

SEQ ID NO: 44298 - DNA, 20 bp, synthetic construct
  misc_feature 1..20: note = chemically synthesized
  source 1..20: mol_type = other DNA
tggtgctctggagccggagg

SEQ ID NO: 44299 - DNA, 20 bp, synthetic construct
  misc_feature 1..20: note = chemically synthesized
  source 1..20: mol_type = other DNA
ggagccggaggtggtgcgcc

SEQ ID NO: 44300 - DNA, 20 bp, synthetic construct
  misc_feature 1..20: note = chemically synthesized
  source 1..20: mol_type = other DNA
ggaggtggtgcgcctggtac

SEQ ID NO: 44301 - DNA, 20 bp, synthetic construct
  misc_feature 1..20: note = chemically synthesized
  source 1..20: mol_type = other DNA
gaggtggtgcgcctggtact

SEQ ID NO: 44302 - DNA, 20 bp, synthetic construct
  misc_feature 1..20: note = chemically synthesized
  source 1..20: mol_type = other DNA
tgcgcctggtactgggaccc

SEQ ID NO: 44303 - DNA, 20 bp, synthetic construct
  misc_feature 1..20: note = chemically synthesized
  source 1..20: mol_type = other DNA
cgcctggtactgggaccccg

SEQ ID NO: 44304 - DNA, 20 bp, synthetic construct
  misc_feature 1..20: note = chemically synthesized
  source 1..20: mol_type = other DNA
ggtactgggaccccggagct

SEQ ID NO: 44305 - DNA, 20 bp, synthetic construct
  misc_feature 1..20: note = chemically synthesized
  source 1..20: mol_type = other DNA
tgggaccccggagctgagcc

SEQ ID NO: 44306 - DNA, 20 bp, synthetic construct
  misc_feature 1..20: note = chemically synthesized
  source 1..20: mol_type = other DNA
cggagctgagcccggcgcct

SEQ ID NO: 44307 - DNA, 20 bp, synthetic construct
  misc_feature 1..20: note = chemically synthesized
  source 1..20: mol_type = other DNA
gcccggcgcctcagcccacc

SEQ ID NO: 44308 - DNA, 20 bp, synthetic construct
  misc_feature 1..20: note = chemically synthesized
  source 1..20: mol_type = other DNA
ggctgtctgccgaccgtgtg

SEQ ID NO: 44309 - DNA, 20 bp, synthetic construct
  misc_feature 1..20: note = chemically synthesized
  source 1..20: mol_type = other DNA
gctgtctgccgaccgtgtgc

SEQ ID NO: 44310 - DNA, 20 bp, synthetic construct
  misc_feature 1..20: note = chemically synthesized
  source 1..20: mol_type = other DNA
ctgtctgccgaccgtgtgcg

SEQ ID NO: 44311 - DNA, 20 bp, synthetic construct
  misc_feature 1..20: note = chemically synthesized
  source 1..20: mol_type = other DNA
ctgccgaccgtgtgcggggc

SEQ ID NO: 44312 - DNA, 20 bp, synthetic construct
  misc_feature 1..20: note = chemically synthesized
  source 1..20: mol_type = other DNA
agtttgctcaacaactctgc

SEQ ID NO: 44313 - DNA, 20 bp, synthetic construct
  misc_feature 1..20: note = chemically synthesized
  source 1..20: mol_type = other DNA
tcaacaactctgccagcttc

SEQ ID NO: 44314 - DNA, 20 bp, synthetic construct
  misc_feature 1..20: note = chemically synthesized
  source 1..20: mol_type = other DNA
ctctgccagcttctggccct

SEQ ID NO: 44315 - DNA, 20 bp, synthetic construct
  misc_feature 1..20: note = chemically synthesized
  source 1..20: mol_type = other DNA
tctgccagcttctggccctc

SEQ ID NO: 44316 - DNA, 20 bp, synthetic construct
  misc_feature 1..20: note = chemically synthesized
  source 1..20: mol_type = other DNA
agcttctggccctcaggctg

SEQ ID NO: 44317 - DNA, 20 bp, synthetic construct
  misc_feature 1..20: note = chemically synthesized
  source 1..20: mol_type = other DNA
gcttctggccctcaggctgt

SEQ ID NO: 44318 - DNA, 20 bp, synthetic construct
  misc_feature 1..20: note = chemically synthesized
  source 1..20: mol_type = other DNA
tctggccctcaggctgtggg

SEQ ID NO: 44319 - DNA, 20 bp, synthetic construct
  misc_feature 1..20: note = chemically synthesized
  source 1..20: mol_type = other DNA
ggctgtgggaagcttcttcc

SEQ ID NO: 44320 - DNA, 20 bp, synthetic construct
  misc_feature 1..20: note = chemically synthesized
  source 1..20: mol_type = other DNA
gctgtgggaagcttcttccc

SEQ ID NO: 44321 - DNA, 20 bp, synthetic construct
  misc_feature 1..20: note = chemically synthesized
  source 1..20: mol_type = other DNA
ctgtgggaagcttcttcccg

SEQ ID NO: 44322 - DNA, 20 bp, synthetic construct
  misc_feature 1..20: note = chemically synthesized
  source 1..20: mol_type = other DNA
gggaagcttcttcccggggc

SEQ ID NO: 44323 - DNA, 20 bp, synthetic construct
  misc_feature 1..20: note = chemically synthesized
  source 1..20: mol_type = other DNA
tcttcccggggcgagaccac

SEQ ID NO: 44324 - DNA, 20 bp, synthetic construct
  misc_feature 1..20: note = chemically synthesized
  source 1..20: mol_type = other DNA
cgagaccactagctttttct

SEQ ID NO: 44325 - DNA, 20 bp, synthetic construct
  misc_feature 1..20: note = chemically synthesized
  source 1..20: mol_type = other DNA
tagctttttctaagtattac

SEQ ID NO: 44326 - DNA, 20 bp, synthetic construct
  misc_feature 1..20: note = chemically synthesized
  source 1..20: mol_type = other DNA
ttttctaagtattaccagcc

SEQ ID NO: 44327 - DNA, 20 bp, synthetic construct
  misc_feature 1..20: note = chemically synthesized
  source 1..20: mol_type = other DNA
tttctaagtattaccagccc

SEQ ID NO: 44328 - DNA, 20 bp, synthetic construct
  misc_feature 1..20: note = chemically synthesized
  source 1..20: mol_type = other DNA
agtattaccagcccaggact

SEQ ID NO: 44329 - DNA, 20 bp, synthetic construct
  misc_feature 1..20: note = chemically synthesized
  source 1..20: mol_type = other DNA
taccagcccaggacttggct

SEQ ID NO: 44330 - DNA, 20 bp, synthetic construct
  misc_feature 1..20: note = chemically synthesized
  source 1..20: mol_type = other DNA
accagcccaggacttggctg

SEQ ID NO: 44331 - DNA, 20 bp, synthetic construct
  misc_feature 1..20: note = chemically synthesized
  source 1..20: mol_type = other DNA
ggctgaggttctgtgtcccc

SEQ ID NO: 44332 - DNA, 20 bp, synthetic construct
  misc_feature 1..20: note = chemically synthesized
  source 1..20: mol_type = other DNA
aggttctgtgtcccccagct

SEQ ID NO: 44333 - DNA, 20 bp, synthetic construct
  misc_feature 1..20: note = chemically synthesized
  source 1..20: mol_type = other DNA
gttctgtgtcccccagcttg

SEQ ID NO: 44334 - DNA, 20 bp, synthetic construct
  misc_feature 1..20: note = chemically synthesized
  source 1..20: mol_type = other DNA
tgtgtcccccagcttggagt

SEQ ID NO: 44335 - DNA, 20 bp, synthetic construct
  misc_feature 1..20: note = chemically synthesized
  source 1..20: mol_type = other DNA
ccccagcttggagtcagatg

SEQ ID NO: 44336 - DNA, 20 bp, synthetic construct
  misc_feature 1..20: note = chemically synthesized
  source 1..20: mol_type = other DNA
cccagcttggagtcagatgt

SEQ ID NO: 44337 - DNA, 20 bp, synthetic construct
  misc_feature 1..20: note = chemically synthesized
  source 1..20: mol_type = other DNA
ccagcttggagtcagatgtg

SEQ ID NO: 44338 - DNA, 20 bp, synthetic construct
  misc_feature 1..20: note = chemically synthesized
  source 1..20: mol_type = other DNA
tcagatgtggggttgaatct

SEQ ID NO: 44339 - DNA, 20 bp, synthetic construct
  misc_feature 1..20: note = chemically synthesized
  source 1..20: mol_type = other DNA
gaatcttggcttcctctcac

SEQ ID NO: 44340 - DNA, 20 bp, synthetic construct
  misc_feature 1..20: note = chemically synthesized
  source 1..20: mol_type = other DNA
tggcttcctctcactagctg

SEQ ID NO: 44341 - DNA, 20 bp, synthetic construct
  misc_feature 1..20: note = chemically synthesized
  source 1..20: mol_type = other DNA
cactagctgtggtgcttgac

SEQ ID NO: 44342 - DNA, 20 bp, synthetic construct
  misc_feature 1..20: note = chemically synthesized
  source 1..20: mol_type = other DNA
ttgacaagtcacttatcctt

SEQ ID NO: 44343 - DNA, 20 bp, synthetic construct
  misc_feature 1..20: note = chemically synthesized
  source 1..20: mol_type = other DNA
ctccattgcctaatctttaa

SEQ ID NO: 44344 - DNA, 20 bp, synthetic construct
  misc_feature 1..20: note = chemically synthesized
  source 1..20: mol_type = other DNA
tccattgcctaatctttaaa

SEQ ID NO: 44345 - DNA, 20 bp, synthetic construct
  misc_feature 1..20: note = chemically synthesized
  source 1..20: mol_type = other DNA
ccattgcctaatctttaaaa

SEQ ID NO: 44346 - DNA, 20 bp, synthetic construct
  misc_feature 1..20: note = chemically synthesized
  source 1..20: mol_type = other DNA
attgcctaatctttaaaagg

SEQ ID NO: 44347 - DNA, 20 bp, synthetic construct
  misc_feature 1..20: note = chemically synthesized
  source 1..20: mol_type = other DNA
ttgcctaatctttaaaaggg

SEQ ID NO: 44348 - DNA, 20 bp, synthetic construct
  misc_feature 1..20: note = chemically synthesized
  source 1..20: mol_type = other DNA
ggaggtgacaatcgtcccta

SEQ ID NO: 44349 - DNA, 20 bp, synthetic construct
  misc_feature 1..20: note = chemically synthesized
  source 1..20: mol_type = other DNA
tgacaatcgtccctacggct

SEQ ID NO: 44350 - DNA, 20 bp, synthetic construct
  misc_feature 1..20: note = chemically synthesized
  source 1..20: mol_type = other DNA
caatcgtccctacggctcag

SEQ ID NO: 44351 - DNA, 20 bp, synthetic construct
  misc_feature 1..20: note = chemically synthesized
  source 1..20: mol_type = other DNA
tcgtccctacggctcagtgg

SEQ ID NO: 44352 - DNA, 20 bp, synthetic construct
  misc_feature 1..20: note = chemically synthesized
  source 1..20: mol_type = other DNA
tccctacggctcagtggcag

SEQ ID NO: 44353 - DNA, 20 bp, synthetic construct
  misc_feature 1..20: note = chemically synthesized
  source 1..20: mol_type = other DNA
tacggctcagtggcagcaga

SEQ ID NO: 44354 - DNA, 20 bp, synthetic construct
  misc_feature 1..20: note = chemically synthesized
  source 1..20: mol_type = other DNA
acggctcagtggcagcagat

SEQ ID NO: 44355 - DNA, 20 bp, synthetic construct
  misc_feature 1..20: note = chemically synthesized
  source 1..20: mol_type = other DNA
cggctcagtggcagcagatg

SEQ ID NO: 44356 - DNA, 20 bp, synthetic construct
  misc_feature 1..20: note = chemically synthesized
  source 1..20: mol_type = other DNA
gctcagtggcagcagatggg

SEQ ID NO: 44357 - DNA, 20 bp, synthetic construct
  misc_feature 1..20: note = chemically synthesized
  source 1..20: mol_type = other DNA
tggcagcagatggggagatg

SEQ ID NO: 44358 - DNA, 20 bp, synthetic construct
  misc_feature 1..20: note = chemically synthesized
  source 1..20: mol_type = other DNA
ggcagcagatggggagatga

SEQ ID NO: 44359 - DNA, 20 bp, synthetic construct
  misc_feature 1..20: note = chemically synthesized
  source 1..20: mol_type = other DNA
gcagcagatggggagatgaa

SEQ ID NO: 44360 - DNA, 20 bp, synthetic construct
  misc_feature 1..20: note = chemically synthesized
  source 1..20: mol_type = other DNA
cagatggggagatgaaggga

SEQ ID NO: 44361 - DNA, 20 bp, synthetic construct
  misc_feature 1..20: note = chemically synthesized
  source 1..20: mol_type = other DNA
gggaaagttctgttgaccat

SEQ ID NO: 44362 - DNA, 20 bp, synthetic construct
  misc_feature 1..20: note = chemically synthesized
  source 1..20: mol_type = other DNA
catgagtgaacttacaatgc

SEQ ID NO: 44363 - DNA, 20 bp, synthetic construct
  misc_feature 1..20: note = chemically synthesized
  source 1..20: mol_type = other DNA
tgaacttacaatgcaagccc

SEQ ID NO: 44364 - DNA, 20 bp, synthetic construct
  misc_feature 1..20: note = chemically synthesized
  source 1..20: mol_type = other DNA
gaacttacaatgcaagcccc

SEQ ID NO: 44365 - DNA, 20 bp, synthetic construct
  misc_feature 1..20: note = chemically synthesized
  source 1..20: mol_type = other DNA
aacttacaatgcaagccccg

SEQ ID NO: 44366 - DNA, 20 bp, synthetic construct
  misc_feature 1..20: note = chemically synthesized
  source 1..20: mol_type = other DNA
acttacaatgcaagccccgg

SEQ ID NO: 44367 - DNA, 20 bp, synthetic construct
  misc_feature 1..20: note = chemically synthesized
  source 1..20: mol_type = other DNA
cttacaatgcaagccccggg

SEQ ID NO: 44368 - DNA, 20 bp, synthetic construct
  misc_feature 1..20: note = chemically synthesized
  source 1..20: mol_type = other DNA
agccccggggggatcacttg

SEQ ID NO: 44369 - DNA, 20 bp, synthetic construct
  misc_feature 1..20: note = chemically synthesized
  source 1..20: mol_type = other DNA
tgcagttttgtccctgtctg

SEQ ID NO: 44370 - DNA, 20 bp, synthetic construct
  misc_feature 1..20: note = chemically synthesized
  source 1..20: mol_type = other DNA
ctgtctgcagtgtgacctgt

SEQ ID NO: 44371 - DNA, 20 bp, synthetic construct
  misc_feature 1..20: note = chemically synthesized
  source 1..20: mol_type = other DNA
attgtctttgctccaaacca

SEQ ID NO: 44372 - DNA, 20 bp, synthetic construct
  misc_feature 1..20: note = chemically synthesized
  source 1..20: mol_type = other DNA
ttgctccaaaccacagctcc

SEQ ID NO: 44373 - DNA, 20 bp, synthetic construct
  misc_feature 1..20: note = chemically synthesized
  source 1..20: mol_type = other DNA
tgctccaaaccacagctcct

SEQ ID NO: 44374 - DNA, 20 bp, synthetic construct
  misc_feature 1..20: note = chemically synthesized
  source 1..20: mol_type = other DNA
gctccaaaccacagctcctg

SEQ ID NO: 44375 - DNA, 20 bp, synthetic construct
  misc_feature 1..20: note = chemically synthesized
  source 1..20: mol_type = other DNA
ccaaaccacagctcctgggg

SEQ ID NO: 44376 - DNA, 20 bp, synthetic construct
  misc_feature 1..20: note = chemically synthesized
  source 1..20: mol_type = other DNA
aaaccacagctcctggggca

SEQ ID NO: 44377 - DNA, 20 bp, synthetic construct
  misc_feature 1..20: note = chemically synthesized
  source 1..20: mol_type = other DNA
aaccacagctcctggggcag

SEQ ID NO: 44378 - DNA, 20 bp, synthetic construct
  misc_feature 1..20: note = chemically synthesized
  source 1..20: mol_type = other DNA
accacagctcctggggcaga

SEQ ID NO: 44379 - DNA, 20 bp, synthetic construct
  misc_feature 1..20: note = chemically synthesized
  source 1..20: mol_type = other DNA
ccacagctcctggggcagag

SEQ ID NO: 44380 - DNA, 20 bp, synthetic construct
  misc_feature 1..20: note = chemically synthesized
  source 1..20: mol_type = other DNA
ggggaaaattctgccactca

SEQ ID NO: 44381 - DNA, 20 bp, synthetic construct
  misc_feature 1..20: note = chemically synthesized
  source 1..20: mol_type = other DNA
gcctgcccacgcttctgtct

SEQ ID NO: 44382 - DNA, 20 bp, synthetic construct
  misc_feature 1..20: note = chemically synthesized
  source 1..20: mol_type = other DNA
acgcttctgtctgagtgtgc

SEQ ID NO: 44383 - DNA, 20 bp, synthetic construct
  misc_feature 1..20: note = chemically synthesized
  source 1..20: mol_type = other DNA
cgcttctgtctgagtgtgct

SEQ ID NO: 44384 - DNA, 20 bp, synthetic construct
  misc_feature 1..20: note = chemically synthesized
  source 1..20: mol_type = other DNA
ttctgtctgagtgtgctggg

SEQ ID NO: 44385 - DNA, 20 bp, synthetic construct
  misc_feature 1..20: note = chemically synthesized
  source 1..20: mol_type = other DNA
tgtctgagtgtgctgggtgg

SEQ ID NO: 44386 - DNA, 20 bp, synthetic construct
  misc_feature 1..20: note = chemically synthesized
  source 1..20: mol_type = other DNA
gtctgagtgtgctgggtggc

SEQ ID NO: 44387 - DNA, 20 bp, synthetic construct
  misc_feature 1..20: note = chemically synthesized
  source 1..20: mol_type = other DNA
gagtgtgctgggtggcagga

SEQ ID NO: 44388 - DNA, 20 bp, synthetic construct
  misc_feature 1..20: note = chemically synthesized
  source 1..20: mol_type = other DNA
gtgctgggtggcaggatggc

SEQ ID NO: 44389 - DNA, 20 bp, synthetic construct
  misc_feature 1..20: note = chemically synthesized
  source 1..20: mol_type = other DNA
caggatggcaagtccttact

SEQ ID NO: 44390 - DNA, 20 bp, synthetic construct
  misc_feature 1..20: note = chemically synthesized
  source 1..20: mol_type = other DNA
tggcaagtccttactcagct

SEQ ID NO: 44391 - DNA, 20 bp, synthetic construct
  misc_feature 1..20: note = chemically synthesized
  source 1..20: mol_type = other DNA
agtccttactcagctcagta

SEQ ID NO: 44392 - DNA, 20 bp, synthetic construct
  misc_feature 1..20: note = chemically synthesized
  source 1..20: mol_type = other DNA
agccctcttccttgttccct

SEQ ID NO: 44393 - DNA, 20 bp, synthetic construct
  misc_feature 1..20: note = chemically synthesized
  source 1..20: mol_type = other DNA
cctgagcctttgactttctc

SEQ ID NO: 44394 - DNA, 20 bp, synthetic construct
  misc_feature 1..20: note = chemically synthesized
  source 1..20: mol_type = other DNA
ctgagcctttgactttctcg

SEQ ID NO: 44395 - DNA, 20 bp, synthetic construct
  misc_feature 1..20: note = chemically synthesized
  source 1..20: mol_type = other DNA
tgagcctttgactttctcga

SEQ ID NO: 44396 - DNA, 20 bp, synthetic construct
  misc_feature 1..20: note = chemically synthesized
  source 1..20: mol_type = other DNA
gactttctcgagggatgttg

SEQ ID NO: 44397 - DNA, 20 bp, synthetic construct
  misc_feature 1..20: note = chemically synthesized
  source 1..20: mol_type = other DNA
actttctcgagggatgttgt

SEQ ID NO: 44398 - DNA, 20 bp, synthetic construct
  misc_feature 1..20: note = chemically synthesized
  source 1..20: mol_type = other DNA
ctttctcgagggatgttgtg

SEQ ID NO: 44399 - DNA, 20 bp, synthetic construct
  misc_feature 1..20: note = chemically synthesized
  source 1..20: mol_type = other DNA
cgagggatgttgtggggttg

SEQ ID NO: 44400 - DNA, 20 bp, synthetic construct
  misc_feature 1..20: note = chemically synthesized
  source 1..20: mol_type = other DNA
ggatgttgtggggttgtggc

SEQ ID NO: 44401 - DNA, 20 bp, synthetic construct
  misc_feature 1..20: note = chemically synthesized
  source 1..20: mol_type = other DNA
gatgttgtggggttgtggcc

SEQ ID NO: 44402 - DNA, 20 bp, synthetic construct
  misc_feature 1..20: note = chemically synthesized
  source 1..20: mol_type = other DNA
tgtggggttgtggccaggat

SEQ ID NO: 44403 - DNA, 20 bp, synthetic construct
  misc_feature 1..20: note = chemically synthesized
  source 1..20: mol_type = other DNA
gggttgtggccaggataaga

SEQ ID NO: 44404 - DNA, 20 bp, synthetic construct
  misc_feature 1..20: note = chemically synthesized
  source 1..20: mol_type = other DNA
ggttgtggccaggataagaa

SEQ ID NO: 44405 - DNA, 20 bp, synthetic construct
  misc_feature 1..20: note = chemically synthesized
  source 1..20: mol_type = other DNA
gttgtggccaggataagaaa

SEQ ID NO: 44406 - DNA, 20 bp, synthetic construct
  misc_feature 1..20: note = chemically synthesized
  source 1..20: mol_type = other DNA
aggataagaaagggcatttc

SEQ ID NO: 44407 - DNA, 20 bp, synthetic construct
  misc_feature 1..20: note = chemically synthesized
  source 1..20: mol_type = other DNA
ctgctccaaaacaactgttc

SEQ ID NO: 44408 - DNA, 20 bp, synthetic construct
  misc_feature 1..20: note = chemically synthesized
  source 1..20: mol_type = other DNA
caaaacaactgttctggaaa

SEQ ID NO: 44409 - DNA, 20 bp, synthetic construct
  misc_feature 1..20: note = chemically synthesized
  source 1..20: mol_type = other DNA
acaactgttctggaaatagt

SEQ ID NO: 44410 - DNA, 20 bp, synthetic construct
  misc_feature 1..20: note = chemically synthesized
  source 1..20: mol_type = other DNA
aatagtgagtaccccatcct

SEQ ID NO: 44411 - DNA, 20 bp, synthetic construct
  misc_feature 1..20: note = chemically synthesized
  source 1..20: mol_type = other DNA
tagtgagtaccccatcctga

SEQ ID NO: 44412 - DNA, 20 bp, synthetic construct
  misc_feature 1..20: note = chemically synthesized
  source 1..20: mol_type = other DNA
agtgagtaccccatcctgag

SEQ ID NO: 44413 - DNA, 20 bp, synthetic construct
  misc_feature 1..20: note = chemically synthesized
  source 1..20: mol_type = other DNA
agtaccccatcctgagaggt

SEQ ID NO: 44414 - DNA, 20 bp, synthetic construct
  misc_feature 1..20: note = chemically synthesized
  source 1..20: mol_type = other DNA
ccccatcctgagaggtgagt

SEQ ID NO: 44415 - DNA, 20 bp, synthetic construct
  misc_feature 1..20: note = chemically synthesized
  source 1..20: mol_type = other DNA
catcctgagaggtgagtaag

SEQ ID NO: 44416 - DNA, 20 bp, synthetic construct
  misc_feature 1..20: note = chemically synthesized
  source 1..20: mol_type = other DNA
tcctgagaggtgagtaagca

SEQ ID NO: 44417 - DNA, 20 bp, synthetic construct
  misc_feature 1..20: note = chemically synthesized
  source 1..20: mol_type = other DNA
cctgagaggtgagtaagcag

SEQ ID NO: 44418 - DNA, 20 bp, synthetic construct
  misc_feature 1..20: note = chemically synthesized
  source 1..20: mol_type = other DNA
gctgtatgaccacctgaacc

SEQ ID NO: 44419 - DNA, 20 bp, synthetic construct
  misc_feature 1..20: note = chemically synthesized
  source 1..20: mol_type = other DNA
accacctgaaccaagccctt

SEQ ID NO: 44420 - DNA, 20 bp, synthetic construct
  misc_feature 1..20: note = chemically synthesized
  source 1..20: mol_type = other DNA
ccacctgaaccaagcccttg

SEQ ID NO: 44421 - DNA, 20 bp, synthetic construct
  misc_feature 1..20: note = chemically synthesized
  source 1..20: mol_type = other DNA
ccttgaggatgtttcttctc

SEQ ID NO: 44422 - DNA, 20 bp, synthetic construct
  misc_feature 1..20: note = chemically synthesized
  source 1..20: mol_type = other DNA
tgaggatgtttcttctctgg

SEQ ID NO: 44423 - DNA, 20 bp, synthetic construct
  misc_feature 1..20: note = chemically synthesized
  source 1..20: mol_type = other DNA
ggatgtttcttctctggtgg

SEQ ID NO: 44424 - DNA, 20 bp, synthetic construct
  misc_feature 1..20: note = chemically synthesized
  source 1..20: mol_type = other DNA
tttcttctctggtggaagtt

SEQ ID NO: 44425 - DNA, 20 bp, synthetic construct
  misc_feature 1..20: note = chemically synthesized
  source 1..20: mol_type = other DNA
tctctggtggaagtttggaa

SEQ ID NO: 44426 - DNA, 20 bp, synthetic construct
  misc_feature 1..20: note = chemically synthesized
  source 1..20: mol_type = other DNA
ctctggtggaagtttggaac

SEQ ID NO: 44427 - DNA, 20 bp, synthetic construct
  misc_feature 1..20: note = chemically synthesized
  source 1..20: mol_type = other DNA
ctggtggaagtttggaacag

SEQ ID NO: 44428 - DNA, 20 bp, synthetic construct
  misc_feature 1..20: note = chemically synthesized
  source 1..20: mol_type = other DNA
tttggaacaggagcctcctc

SEQ ID NO: 44429 - DNA, 20 bp, synthetic construct
  misc_feature 1..20: note = chemically synthesized
  source 1..20: mol_type = other DNA
tcatttattcattcattcaa

SEQ ID NO: 44430 - DNA, 20 bp, synthetic construct
  misc_feature 1..20: note = chemically synthesized
  source 1..20: mol_type = other DNA
ttcattcaatggttattttg

SEQ ID NO: 44431 - DNA, 20 bp, synthetic construct
  misc_feature 1..20: note = chemically synthesized
  source 1..20: mol_type = other DNA
tcattcaatggttattttgt

SEQ ID NO: 44432 - DNA, 20 bp, synthetic construct
  misc_feature 1..20: note = chemically synthesized
  source 1..20: mol_type = other DNA
tattttgtgggaatcgaatt

SEQ ID NO: 44433 - DNA, 20 bp, synthetic construct
  misc_feature 1..20: note = chemically synthesized
  source 1..20: mol_type = other DNA
tttagaatgaaaatattttt

SEQ ID NO: 44434 - DNA, 20 bp, synthetic construct
  misc_feature 1..20: note = chemically synthesized
  source 1..20: mol_type = other DNA
gaatgaaaatattttttggc

SEQ ID NO: 44435 - DNA, 20 bp, synthetic construct
  misc_feature 1..20: note = chemically synthesized
  source 1..20: mol_type = other DNA
tgaaaatattttttggcaag

SEQ ID NO: 44436 - DNA, 20 bp, synthetic construct
  misc_feature 1..20: note = chemically synthesized
  source 1..20: mol_type = other DNA
ggcaagcagaaaataatttt

SEQ ID NO: 44437 - DNA, 20 bp, synthetic construct
  misc_feature 1..20: note = chemically synthesized
  source 1..20: mol_type = other DNA
ttagaccaatccttttcttt

SEQ ID NO: 44438 - DNA, 20 bp, synthetic construct
  misc_feature 1..20: note = chemically synthesized
  source 1..20: mol_type = other DNA
aatccttttcttttagtcat

SEQ ID NO: 44439 - DNA, 20 bp, synthetic construct
  misc_feature 1..20: note = chemically synthesized
  source 1..20: mol_type = other DNA
tcttttagtcatgagaaact

SEQ ID NO: 44440 - DNA, 20 bp, synthetic construct
  misc_feature 1..20: note = chemically synthesized
  source 1..20: mol_type = other DNA
cttttagtcatgagaaactg

SEQ ID NO: 44441 - DNA, 20 bp, synthetic construct
  misc_feature 1..20: note = chemically synthesized
  source 1..20: mol_type = other DNA
agtcatgagaaactgaggcc

SEQ ID NO: 44442 - DNA, 20 bp, synthetic construct
  misc_feature 1..20: note = chemically synthesized
  source 1..20: mol_type = other DNA
tcatgagaaactgaggccca

SEQ ID NO: 44443 - DNA, 20 bp, synthetic construct
  misc_feature 1..20: note = chemically synthesized
  source 1..20: mol_type = other DNA
atgagaaactgaggcccaga

SEQ ID NO: 44444 - DNA, 20 bp, synthetic construct
  misc_feature 1..20: note = chemically synthesized
  source 1..20: mol_type = other DNA
gagaaactgaggcccagaga

SEQ ID NO: 44445 - DNA, 20 bp, synthetic construct
  misc_feature 1..20: note = chemically synthesized
  source 1..20: mol_type = other DNA
agaaactgaggcccagagag

SEQ ID NO: 44446 - DNA, 20 bp, synthetic construct
  misc_feature 1..20: note = chemically synthesized
  source 1..20: mol_type = other DNA
aaactgaggcccagagagag

SEQ ID NO: 44447 - DNA, 20 bp, synthetic construct
  misc_feature 1..20: note = chemically synthesized
  source 1..20: mol_type = other DNA
aactgaggcccagagagagg

SEQ ID NO: 44448 - DNA, 20 bp, synthetic construct
  misc_feature 1..20: note = chemically synthesized
  source 1..20: mol_type = other DNA
ccagagagaggaggtcaccc

SEQ ID NO: 44449 - DNA, 20 bp, synthetic construct
  misc_feature 1..20: note = chemically synthesized
  source 1..20: mol_type = other DNA
cagagagaggaggtcacccc

SEQ ID NO: 44450 - DNA, 20 bp, synthetic construct
  misc_feature 1..20: note = chemically synthesized
  source 1..20: mol_type = other DNA
ggaggtcaccccaggtgcat

SEQ ID NO: 44451 - DNA, 20 bp, synthetic construct
  misc_feature 1..20: note = chemically synthesized
  source 1..20: mol_type = other DNA
caccccaggtgcattagaac

SEQ ID NO: 44452 - DNA, 20 bp, synthetic construct
  misc_feature 1..20: note = chemically synthesized
  source 1..20: mol_type = other DNA
accccaggtgcattagaact

SEQ ID NO: 44453 - DNA, 20 bp, synthetic construct
  misc_feature 1..20: note = chemically synthesized
  source 1..20: mol_type = other DNA
gtgcattagaactgggtttc

SEQ ID NO: 44454 - DNA, 20 bp, synthetic construct
  misc_feature 1..20: note = chemically synthesized
  source 1..20: mol_type = other DNA
agaactgacactccactgca

SEQ ID NO: 44455 - DNA, 20 bp, synthetic construct
  misc_feature 1..20: note = chemically synthesized
  source 1..20: mol_type = other DNA
aactgacactccactgcaca

SEQ ID NO: 44456 - DNA, 20 bp, synthetic construct
  misc_feature 1..20: note = chemically synthesized
  source 1..20: mol_type = other DNA
caattcattcaatttttatt

SEQ ID NO: 44457 - DNA, 20 bp, synthetic construct
  misc_feature 1..20: note = chemically synthesized
  source 1..20: mol_type = other DNA
ttcattcaatttttatttag

SEQ ID NO: 44458 - DNA, 20 bp, synthetic construct
  misc_feature 1..20: note = chemically synthesized
  source 1..20: mol_type = other DNA
attcaatttttatttagcgg

SEQ ID NO: 44459 - DNA, 20 bp, synthetic construct
  misc_feature 1..20: note = chemically synthesized
  source 1..20: mol_type = other DNA
ttcaatttttatttagcgga

SEQ ID NO: 44460 - DNA, 20 bp, synthetic construct
  misc_feature 1..20: note = chemically synthesized
  source 1..20: mol_type = other DNA
tatttagcggaaggcatttt

SEQ ID NO: 44461 - DNA, 20 bp, synthetic construct
  misc_feature 1..20: note = chemically synthesized
  source 1..20: mol_type = other DNA
tagcggaaggcattttcaga

SEQ ID NO: 44462 - DNA, 20 bp, synthetic construct
  misc_feature 1..20: note = chemically synthesized
  source 1..20: mol_type = other DNA
agcggaaggcattttcagat

SEQ ID NO: 44463 - DNA, 20 bp, synthetic construct
  misc_feature 1..20: note = chemically synthesized
  source 1..20: mol_type = other DNA
cattttcagatgggtctttg

SEQ ID NO: 44464 - DNA, 20 bp, synthetic construct
  misc_feature 1..20: note = chemically synthesized
  source 1..20: mol_type = other DNA
cagatgggtctttgaagcat

SEQ ID NO: 44465 - DNA, 20 bp, synthetic construct
  misc_feature 1..20: note = chemically synthesized
  source 1..20: mol_type = other DNA
atgggtctttgaagcattag

SEQ ID NO: 44466 - DNA, 20 bp, synthetic construct
  misc_feature 1..20: note = chemically synthesized
  source 1..20: mol_type = other DNA
tgggtctttgaagcattagt

SEQ ID NO: 44467 - DNA, 20 bp, synthetic construct
  misc_feature 1..20: note = chemically synthesized
  source 1..20: mol_type = other DNA
ggtctttgaagcattagtag

SEQ ID NO: 44468 - DNA, 20 bp, synthetic construct
  misc_feature 1..20: note = chemically synthesized
  source 1..20: mol_type = other DNA
ttgaagcattagtaggagtt

SEQ ID NO: 44469 - DNA, 20 bp, synthetic construct
  misc_feature 1..20: note = chemically synthesized
  source 1..20: mol_type = other DNA
tagtaggagttcagcgatga

SEQ ID NO: 44470 - DNA, 20 bp, synthetic construct
  misc_feature 1..20: note = chemically synthesized
  source 1..20: mol_type = other DNA
ttcagcgatgatggtgtcat

SEQ ID NO: 44471 - DNA, 20 bp, synthetic construct
  misc_feature 1..20: note = chemically synthesized
  source 1..20: mol_type = other DNA
gtgtcatgagaattttattc

SEQ ID NO: 44472 - DNA, 20 bp, synthetic construct
  misc_feature 1..20: note = chemically synthesized
  source 1..20: mol_type = other DNA
tgtcatgagaattttattct

SEQ ID NO: 44473 - DNA, 20 bp, synthetic construct
  misc_feature 1..20: note = chemically synthesized
  source 1..20: mol_type = other DNA
tgagaattttattctaggat

SEQ ID NO: 44474 - DNA, 20 bp, synthetic construct
  misc_feature 1..20: note = chemically synthesized
  source 1..20: mol_type = other DNA
gagaattttattctaggatt

SEQ ID NO: 44475 - DNA, 20 bp, synthetic construct
  misc_feature 1..20: note = chemically synthesized
  source 1..20: mol_type = other DNA
gaattttattctaggattag

SEQ ID NO: 44476 - DNA, 20 bp, synthetic construct
  misc_feature 1..20: note = chemically synthesized
  source 1..20: mol_type = other DNA
aattttattctaggattagg

SEQ ID NO: 44477 - DNA, 20 bp, synthetic construct
  misc_feature 1..20: note = chemically synthesized
  source 1..20: mol_type = other DNA
attaggaggtaccatgaaca

SEQ ID NO: 44478 - DNA, 20 bp, synthetic construct
  misc_feature 1..20: note = chemically synthesized
  source 1..20: mol_type = other DNA
aggtaccatgaacaaagata

SEQ ID NO: 44479 - DNA, 20 bp, synthetic construct
  misc_feature 1..20: note = chemically synthesized
  source 1..20: mol_type = other DNA
gtaccatgaacaaagataca

SEQ ID NO: 44480 - DNA, 20 bp, synthetic construct
  misc_feature 1..20: note = chemically synthesized
  source 1..20: mol_type = other DNA
catgaacaaagatacagagc

SEQ ID NO: 44481 - DNA, 20 bp, synthetic construct
  misc_feature 1..20: note = chemically synthesized
  source 1..20: mol_type = other DNA
atgaacaaagatacagagct

SEQ ID NO: 44482 - DNA, 20 bp, synthetic construct
  misc_feature 1..20: note = chemically synthesized
  source 1..20: mol_type = other DNA
agatacagagctgggaaaac

SEQ ID NO: 44483 - DNA, 20 bp, synthetic construct
  misc_feature 1..20: note = chemically synthesized
  source 1..20: mol_type = other DNA
atacagagctgggaaaacca

SEQ ID NO: 44484 - DNA, 20 bp, synthetic construct
  misc_feature 1..20: note = chemically synthesized
  source 1..20: mol_type = other DNA
tacagagctgggaaaaccag

SEQ ID NO: 44485 - DNA, 20 bp, synthetic construct
  misc_feature 1..20: note = chemically synthesized
  source 1..20: mol_type = other DNA
agagctgggaaaaccagagg

SEQ ID NO: 44486 - DNA, 20 bp, synthetic construct
  misc_feature 1..20: note = chemically synthesized
  source 1..20: mol_type = other DNA
gctgggaaaaccagaggtgg

SEQ ID NO: 44487 - DNA, 20 bp, synthetic construct
  misc_feature 1..20: note = chemically synthesized
  source 1..20: mol_type = other DNA
gaaaaccagaggtggaagat

SEQ ID NO: 44488 - DNA, 20 bp, synthetic construct
  misc_feature 1..20: note = chemically synthesized
  source 1..20: mol_type = other DNA
aaaaccagaggtggaagata

SEQ ID NO: 44489 - DNA, 20 bp, synthetic construct
  misc_feature 1..20: note = chemically synthesized
  source 1..20: mol_type = other DNA
aaccagaggtggaagataag

SEQ ID NO: 44490 - DNA, 20 bp, synthetic construct
  misc_feature 1..20: note = chemically synthesized
  source 1..20: mol_type = other DNA
agataaggagcacatgtcca

SEQ ID NO: 44491 - DNA, 20 bp, synthetic construct
  misc_feature 1..20: note = chemically synthesized
  source 1..20: mol_type = other DNA
gttctttttctttttttttt

SEQ ID NO: 44492 - DNA, 20 bp, synthetic construct
  misc_feature 1..20: note = chemically synthesized
  source 1..20: mol_type = other DNA
tttttcttttttttttgaga

SEQ ID NO: 44493 - DNA, 20 bp, synthetic construct
  misc_feature 1..20: note = chemically synthesized
  source 1..20: mol_type = other DNA
tttcttttttttttgagatg

SEQ ID NO: 44494 - DNA, 20 bp, synthetic construct
  misc_feature 1..20: note = chemically synthesized
  source 1..20: mol_type = other DNA
ggagtttcgctcttgttgcc

SEQ ID NO: 44495 - DNA, 20 bp, synthetic construct
  misc_feature 1..20: note = chemically synthesized
  source 1..20: mol_type = other DNA
gagtttcgctcttgttgccc

SEQ ID NO: 44496 - DNA, 20 bp, synthetic construct
  misc_feature 1..20: note = chemically synthesized
  source 1..20: mol_type = other DNA
ttcgctcttgttgcccaggc

SEQ ID NO: 44497 - DNA, 20 bp, synthetic construct
  misc_feature 1..20: note = chemically synthesized
  source 1..20: mol_type = other DNA
cgctcttgttgcccaggctg

SEQ ID NO: 44498 - DNA, 20 bp, synthetic construct
  misc_feature 1..20: note = chemically synthesized
  source 1..20: mol_type = other DNA
ttgcccaggctggagtgcaa

SEQ ID NO: 44499 - DNA, 20 bp, synthetic construct
  misc_feature 1..20: note = chemically synthesized
  source 1..20: mol_type = other DNA
caggctggagtgcaatggtg

SEQ ID NO: 44500 - DNA, 20 bp, synthetic construct
  misc_feature 1..20: note = chemically synthesized
  source 1..20: mol_type = other DNA
ggagtgcaatggtgcagtct

SEQ ID NO: 44501 - DNA, 20 bp, synthetic construct
  misc_feature 1..20: note = chemically synthesized
  source 1..20: mol_type = other DNA
tcactgcaacatctgtctcc

SEQ ID NO: 44502 - DNA, 20 bp, synthetic construct
  misc_feature 1..20: note = chemically synthesized
  source 1..20: mol_type = other DNA
cactgcaacatctgtctccc

SEQ ID NO: 44503 - DNA, 20 bp, synthetic construct
  misc_feature 1..20: note = chemically synthesized
  source 1..20: mol_type = other DNA
aacatctgtctcccgggttc

SEQ ID NO: 44504 - DNA, 20 bp, synthetic construct
  misc_feature 1..20: note = chemically synthesized
  source 1..20: mol_type = other DNA
atctgtctcccgggttcaag

SEQ ID NO: 44505 - DNA, 20 bp, synthetic construct
  misc_feature 1..20: note = chemically synthesized
  source 1..20: mol_type = other DNA
ttcaagtggttctcctgcct

SEQ ID NO: 44506 - DNA, 20 bp, synthetic construct
  misc_feature 1..20: note = chemically synthesized
  source 1..20: mol_type = other DNA
ttctcctgcctcagcctccc

SEQ ID NO: 44507 - DNA, 20 bp, synthetic construct
  misc_feature 1..20: note = chemically synthesized
  source 1..20: mol_type = other DNA
tcctgcctcagcctcccaag

SEQ ID NO: 44508 - DNA, 20 bp, synthetic construct
  misc_feature 1..20: note = chemically synthesized
  source 1..20: mol_type = other DNA
gcctcagcctcccaagaagc

SEQ ID NO: 44509 - DNA, 20 bp, synthetic construct
  misc_feature 1..20: note = chemically synthesized
  source 1..20: mol_type = other DNA
cctcagcctcccaagaagct

SEQ ID NO: 44510 - DNA, 20 bp, synthetic construct
  misc_feature 1..20: note = chemically synthesized
  source 1..20: mol_type = other DNA
ctcccaagaagctgggatta

SEQ ID NO: 44511 - DNA, 20 bp, synthetic construct
  misc_feature 1..20: note = chemically synthesized
  source 1..20: mol_type = other DNA
tcccaagaagctgggattac

SEQ ID NO: 44512 - DNA, 20 bp, synthetic construct
  misc_feature 1..20: note = chemically synthesized
  source 1..20: mol_type = other DNA
caggtacctgccaccacgcc

SEQ ID NO: 44513 - DNA, 20 bp, synthetic construct
  misc_feature 1..20: note = chemically synthesized
  source 1..20: mol_type = other DNA
ccggctaatttttgtatttt

SEQ ID NO: 44514 - DNA, 20 bp, synthetic construct
  misc_feature 1..20: note = chemically synthesized
  source 1..20: mol_type = other DNA
gctaatttttgtatttttag

SEQ ID NO: 44515 - DNA, 20 bp, synthetic construct
  misc_feature 1..20: note = chemically synthesized
  source 1..20: mol_type = other DNA
taatttttgtatttttagta

SEQ ID NO: 44516 - DNA, 20 bp, synthetic construct
  misc_feature 1..20: note = chemically synthesized
  source 1..20: mol_type = other DNA
tttttgtatttttagtagag

SEQ ID NO: 44517 - DNA, 20 bp, synthetic construct
  misc_feature 1..20: note = chemically synthesized
  source 1..20: mol_type = other DNA
ttttgtatttttagtagaga

SEQ ID NO: 44518 - DNA, 20 bp, synthetic construct
  misc_feature 1..20: note = chemically synthesized
  source 1..20: mol_type = other DNA
tttgtatttttagtagagaa

SEQ ID NO: 44519 - DNA, 20 bp, synthetic construct
  misc_feature 1..20: note = chemically synthesized
  source 1..20: mol_type = other DNA
ttgtatttttagtagagaag

SEQ ID NO: 44520 - DNA, 20 bp, synthetic construct
  misc_feature 1..20: note = chemically synthesized
  source 1..20: mol_type = other DNA
gagaaggggtttcaccacgt

SEQ ID NO: 44521 - DNA, 20 bp, synthetic construct
  misc_feature 1..20: note = chemically synthesized
  source 1..20: mol_type = other DNA
aggggtttcaccacgttggc

SEQ ID NO: 44522 - DNA, 20 bp, synthetic construct
  misc_feature 1..20: note = chemically synthesized
  source 1..20: mol_type = other DNA
ggggtttcaccacgttggcc

SEQ ID NO: 44523 - DNA, 20 bp, synthetic construct
  misc_feature 1..20: note = chemically synthesized
  source 1..20: mol_type = other DNA
tttcaccacgttggccaggc

SEQ ID NO: 44524 - DNA, 20 bp, synthetic construct
  misc_feature 1..20: note = chemically synthesized
  source 1..20: mol_type = other DNA
tcgcaaactcctgacctcct

SEQ ID NO: 44525 - DNA, 20 bp, synthetic construct
  misc_feature 1..20: note = chemically synthesized
  source 1..20: mol_type = other DNA
caaactcctgacctcctcag

SEQ ID NO: 44526 - DNA, 20 bp, synthetic construct
  misc_feature 1..20: note = chemically synthesized
  source 1..20: mol_type = other DNA
ctgacctcctcagtggatcc

SEQ ID NO: 44527 - DNA, 20 bp, synthetic construct
  misc_feature 1..20: note = chemically synthesized
  source 1..20: mol_type = other DNA
tgacctcctcagtggatccg

SEQ ID NO: 44528 - DNA, 20 bp, synthetic construct
  misc_feature 1..20: note = chemically synthesized
  source 1..20: mol_type = other DNA
acctcctcagtggatccgag

SEQ ID NO: 44529 - DNA, 20 bp, synthetic construct
  misc_feature 1..20: note = chemically synthesized
  source 1..20: mol_type = other DNA
cctcctcagtggatccgagg

SEQ ID NO: 44530 - DNA, 20 bp, synthetic construct
  misc_feature 1..20: note = chemically synthesized
  source 1..20: mol_type = other DNA
aggaggtgatcctcccgcct

SEQ ID NO: 44531 - DNA, 20 bp, synthetic construct
  misc_feature 1..20: note = chemically synthesized
  source 1..20: mol_type = other DNA
cctcccgcctcagcctccca

SEQ ID NO: 44532 - DNA, 20 bp, synthetic construct
  misc_feature 1..20: note = chemically synthesized
  source 1..20: mol_type = other DNA
ctcccaaagtgctcgaatta

SEQ ID NO: 44533 - DNA, 20 bp, synthetic construct
  misc_feature 1..20: note = chemically synthesized
  source 1..20: mol_type = other DNA
tcccaaagtgctcgaattac

SEQ ID NO: 44534 - DNA, 20 bp, synthetic construct
  misc_feature 1..20: note = chemically synthesized
  source 1..20: mol_type = other DNA
agtgctcgaattacaggtgt

SEQ ID NO: 44535 - DNA, 20 bp, synthetic construct
  misc_feature 1..20: note = chemically synthesized
  source 1..20: mol_type = other DNA
caggtgtgagccaccacgcc

SEQ ID NO: 44536 - DNA, 20 bp, synthetic construct
  misc_feature 1..20: note = chemically synthesized
  source 1..20: mol_type = other DNA
gccaccacgcctggcctcca

SEQ ID NO: 44537 - DNA, 20 bp, synthetic construct
  misc_feature 1..20: note = chemically synthesized
  source 1..20: mol_type = other DNA
taaaatgttacgaaaaccaa

SEQ ID NO: 44538 - DNA, 20 bp, synthetic construct
  misc_feature 1..20: note = chemically synthesized
  source 1..20: mol_type = other DNA
tttttttgtgatttatttga

SEQ ID NO: 44539 - DNA, 20 bp, synthetic construct
  misc_feature 1..20: note = chemically synthesized
  source 1..20: mol_type = other DNA
ttttgtgatttatttgatgg

SEQ ID NO: 44540 - DNA, 20 bp, synthetic construct
  misc_feature 1..20: note = chemically synthesized
  source 1..20: mol_type = other DNA
cacctgacgtgaactgacat

SEQ ID NO: 44541 - DNA, 20 bp, synthetic construct
  misc_feature 1..20: note = chemically synthesized
  source 1..20: mol_type = other DNA
acatgagattatttttaatt

SEQ ID NO: 44542 - DNA, 20 bp, synthetic construct
  misc_feature 1..20: note = chemically synthesized
  source 1..20: mol_type = other DNA
tattcatatattttgctgca

SEQ ID NO: 44543 - DNA, 20 bp, synthetic construct
  misc_feature 1..20: note = chemically synthesized
  source 1..20: mol_type = other DNA
atattttgctgcatagatta

SEQ ID NO: 44544 - DNA, 20 bp, synthetic construct
  misc_feature 1..20: note = chemically synthesized
  source 1..20: mol_type = other DNA
gctgcatagattacagtatg

SEQ ID NO: 44545 - DNA, 20 bp, synthetic construct
  misc_feature 1..20: note = chemically synthesized
  source 1..20: mol_type = other DNA
tagattacagtatgcagctc

SEQ ID NO: 44546 - DNA, 20 bp, synthetic construct
  misc_feature 1..20: note = chemically synthesized
  source 1..20: mol_type = other DNA
atgcagctccagattcttcc

SEQ ID NO: 44547 - DNA, 20 bp, synthetic construct
  misc_feature 1..20: note = chemically synthesized
  source 1..20: mol_type = other DNA
cagctccagattcttccaag

SEQ ID NO: 44548 - DNA, 20 bp, synthetic construct
  misc_feature 1..20: note = chemically synthesized
  source 1..20: mol_type = other DNA
tgcctttctaaaatccaaac

SEQ ID NO: 44549 - DNA, 20 bp, synthetic construct
  misc_feature 1..20: note = chemically synthesized
  source 1..20: mol_type = other DNA
ctaaaatccaaacaagttct

SEQ ID NO: 44550 - DNA, 20 bp, synthetic construct
  misc_feature 1..20: note = chemically synthesized
  source 1..20: mol_type = other DNA
taaaatccaaacaagttctg

SEQ ID NO: 44551 - DNA, 20 bp, synthetic construct
  misc_feature 1..20: note = chemically synthesized
  source 1..20: mol_type = other DNA
tctgaggttcaaaaccgttt

SEQ ID NO: 44552 - DNA, 20 bp, synthetic construct
  misc_feature 1..20: note = chemically synthesized
  source 1..20: mol_type = other DNA
ttcaaaaccgttttggccct

SEQ ID NO: 44553 - DNA, 20 bp, synthetic construct
  misc_feature 1..20: note = chemically synthesized
  source 1..20: mol_type = other DNA
tcaaaaccgttttggcccta

SEQ ID NO: 44554 - DNA, 20 bp, synthetic construct
  misc_feature 1..20: note = chemically synthesized
  source 1..20: mol_type = other DNA
ccgttttggccctaaggctt

SEQ ID NO: 44555 - DNA, 20 bp, synthetic construct
  misc_feature 1..20: note = chemically synthesized
  source 1..20: mol_type = other DNA
cgttttggccctaaggcttt

SEQ ID NO: 44556 - DNA, 20 bp, synthetic construct
  misc_feature 1..20: note = chemically synthesized
  source 1..20: mol_type = other DNA
tggccctaaggctttgggta

SEQ ID NO: 44557 - DNA, 20 bp, synthetic construct
  misc_feature 1..20: note = chemically synthesized
  source 1..20: mol_type = other DNA
ggccctaaggctttgggtaa

SEQ ID NO: 44558 - DNA, 20 bp, synthetic construct
  misc_feature 1..20: note = chemically synthesized
  source 1..20: mol_type = other DNA
gccctaaggctttgggtaaa

SEQ ID NO: 44559 - DNA, 20 bp, synthetic construct
  misc_feature 1..20: note = chemically synthesized
  source 1..20: mol_type = other DNA
ccctaaggctttgggtaaag

SEQ ID NO: 44560 - DNA, 20 bp, synthetic construct
  misc_feature 1..20: note = chemically synthesized
  source 1..20: mol_type = other DNA
cctaaggctttgggtaaagg

SEQ ID NO: 44561 - DNA, 20 bp, synthetic construct
  misc_feature 1..20: note = chemically synthesized
  source 1..20: mol_type = other DNA
aaggctttgggtaaaggggg

SEQ ID NO: 44562 - DNA, 20 bp, synthetic construct
  misc_feature 1..20: note = chemically synthesized
  source 1..20: mol_type = other DNA
ggactctgttctactctgac

SEQ ID NO: 44563 - DNA, 20 bp, synthetic construct
  misc_feature 1..20: note = chemically synthesized
  source 1..20: mol_type = other DNA
actctgttctactctgactg

SEQ ID NO: 44564 - DNA, 20 bp, synthetic construct
  misc_feature 1..20: note = chemically synthesized
  source 1..20: mol_type = other DNA
ttctactctgactggagtcc

SEQ ID NO: 44565 - DNA, 20 bp, synthetic construct
  misc_feature 1..20: note = chemically synthesized
  source 1..20: mol_type = other DNA
gagtccaagatgcatatata

SEQ ID NO: 44566 - DNA, 20 bp, synthetic construct
  misc_feature 1..20: note = chemically synthesized
  source 1..20: mol_type = other DNA
gtccaagatgcatatataca

SEQ ID NO: 44567 - DNA, 20 bp, synthetic construct
  misc_feature 1..20: note = chemically synthesized
  source 1..20: mol_type = other DNA
gatgcatatatacagagata

SEQ ID NO: 44568 - DNA, 20 bp, synthetic construct
  misc_feature 1..20: note = chemically synthesized
  source 1..20: mol_type = other DNA
atgcatatatacagagatat

SEQ ID NO: 44569 - DNA, 20 bp, synthetic construct
  misc_feature 1..20: note = chemically synthesized
  source 1..20: mol_type = other DNA
atatacagagatatgggtga

SEQ ID NO: 44570 - DNA, 20 bp, synthetic construct
  misc_feature 1..20: note = chemically synthesized
  source 1..20: mol_type = other DNA
tatacagagatatgggtgat

SEQ ID NO: 44571 - DNA, 20 bp, synthetic construct
  misc_feature 1..20: note = chemically synthesized
  source 1..20: mol_type = other DNA
atacagagatatgggtgatg

SEQ ID NO: 44572 - DNA, 20 bp, synthetic construct
  misc_feature 1..20: note = chemically synthesized
  source 1..20: mol_type = other DNA
gatatgggtgatggggctgc

SEQ ID NO: 44573 - DNA, 20 bp, synthetic construct
  misc_feature 1..20: note = chemically synthesized
  source 1..20: mol_type = other DNA
atatgggtgatggggctgca

SEQ ID NO: 44574 - DNA, 20 bp, synthetic construct
  misc_feature 1..20: note = chemically synthesized
  source 1..20: mol_type = other DNA
tgggtgatggggctgcaagg

SEQ ID NO: 44575 - DNA, 20 bp, synthetic construct
  misc_feature 1..20: note = chemically synthesized
  source 1..20: mol_type = other DNA
gggtgatggggctgcaaggt

SEQ ID NO: 44576 - DNA, 20 bp, synthetic construct
  misc_feature 1..20: note = chemically synthesized
  source 1..20: mol_type = other DNA
atggggctgcaaggtaggtt

SEQ ID NO: 44577 - DNA, 20 bp, synthetic construct
  misc_feature 1..20: note = chemically synthesized
  source 1..20: mol_type = other DNA
tggggctgcaaggtaggttg

SEQ ID NO: 44578 - DNA, 20 bp, synthetic construct
  misc_feature 1..20: note = chemically synthesized
  source 1..20: mol_type = other DNA
ggctgcaaggtaggttgagg

SEQ ID NO: 44579 - DNA, 20 bp, synthetic construct
  misc_feature 1..20: note = chemically synthesized
  source 1..20: mol_type = other DNA
gctgcaaggtaggttgaggt

SEQ ID NO: 44580 - DNA, 20 bp, synthetic construct
  misc_feature 1..20: note = chemically synthesized
  source 1..20: mol_type = other DNA
ctgcaaggtaggttgaggta

SEQ ID NO: 44581 - DNA, 20 bp, synthetic construct
  misc_feature 1..20: note = chemically synthesized
  source 1..20: mol_type = other DNA
tgcaaggtaggttgaggtag

SEQ ID NO: 44582 - DNA, 20 bp, synthetic construct
  misc_feature 1..20: note = chemically synthesized
  source 1..20: mol_type = other DNA
ggtaggttgaggtaggggcc

SEQ ID NO: 44583 - DNA, 20 bp, synthetic construct
  misc_feature 1..20: note = chemically synthesized
  source 1..20: mol_type = other DNA
gtaggttgaggtaggggcca

SEQ ID NO: 44584 - DNA, 20 bp, synthetic construct
  misc_feature 1..20: note = chemically synthesized
  source 1..20: mol_type = other DNA
aggttgaggtaggggccaag

SEQ ID NO: 44585 - DNA, 20 bp, synthetic construct
  misc_feature 1..20: note = chemically synthesized
  source 1..20: mol_type = other DNA
ggttgaggtaggggccaagg

SEQ ID NO: 44586 - DNA, 20 bp, synthetic construct
  misc_feature 1..20: note = chemically synthesized
  source 1..20: mol_type = other DNA
ttgaggtaggggccaaggag

SEQ ID NO: 44587 - DNA, 20 bp, synthetic construct
  misc_feature 1..20: note = chemically synthesized
  source 1..20: mol_type = other DNA
gtaggggccaaggaggagca

SEQ ID NO: 44588 - DNA, 20 bp, synthetic construct
  misc_feature 1..20: note = chemically synthesized
  source 1..20: mol_type = other DNA
aggggccaaggaggagcatg

SEQ ID NO: 44589 - DNA, 20 bp, synthetic construct
  misc_feature 1..20: note = chemically synthesized
  source 1..20: mol_type = other DNA
ccaaggaggagcatggagtt

SEQ ID NO: 44590 - DNA, 20 bp, synthetic construct
  misc_feature 1..20: note = chemically synthesized
  source 1..20: mol_type = other DNA
ggagtttggacttgattcat

SEQ ID NO: 44591 - DNA, 20 bp, synthetic construct
  misc_feature 1..20: note = chemically synthesized
  source 1..20: mol_type = other DNA
gagtttggacttgattcatg

SEQ ID NO: 44592 - DNA, 20 bp, synthetic construct
  misc_feature 1..20: note = chemically synthesized
  source 1..20: mol_type = other DNA
ggacttgattcatgaggctg

SEQ ID NO: 44593 - DNA, 20 bp, synthetic construct
  misc_feature 1..20: note = chemically synthesized
  source 1..20: mol_type = other DNA
gacttgattcatgaggctgt

SEQ ID NO: 44594 - DNA, 20 bp, synthetic construct
  misc_feature 1..20: note = chemically synthesized
  source 1..20: mol_type = other DNA
acttgattcatgaggctgtg

SEQ ID NO: 44595 - DNA, 20 bp, synthetic construct
  misc_feature 1..20: note = chemically synthesized
  source 1..20: mol_type = other DNA
ttgattcatgaggctgtggg

SEQ ID NO: 44596 - DNA, 20 bp, synthetic construct
  misc_feature 1..20: note = chemically synthesized
  source 1..20: mol_type = other DNA
ttcatgaggctgtggggagc

SEQ ID NO: 44597 - DNA, 20 bp, synthetic construct
  misc_feature 1..20: note = chemically synthesized
  source 1..20: mol_type = other DNA
gaggctgtggggagccagtg

SEQ ID NO: 44598 - DNA, 20 bp, synthetic construct
  misc_feature 1..20: note = chemically synthesized
  source 1..20: mol_type = other DNA
aggctgtggggagccagtga

SEQ ID NO: 44599 - DNA, 20 bp, synthetic construct
  misc_feature 1..20: note = chemically synthesized
  source 1..20: mol_type = other DNA
gggagccagtgaaggttctt

SEQ ID NO: 44600 - DNA, 20 bp, synthetic construct
  misc_feature 1..20: note = chemically synthesized
  source 1..20: mol_type = other DNA
agccagtgaaggttcttaag

SEQ ID NO: 44601 - DNA, 20 bp, synthetic construct
  misc_feature 1..20: note = chemically synthesized
  source 1..20: mol_type = other DNA
gccagtgaaggttcttaagc

SEQ ID NO: 44602 - DNA, 20 bp, synthetic construct
  misc_feature 1..20: note = chemically synthesized
  source 1..20: mol_type = other DNA
ttaagcaggtatgtctgcct

SEQ ID NO: 44603 - DNA, 20 bp, synthetic construct
  misc_feature 1..20: note = chemically synthesized
  source 1..20: mol_type = other DNA
aagcaggtatgtctgcctga

SEQ ID NO: 44604 - DNA, 20 bp, synthetic construct
  misc_feature 1..20: note = chemically synthesized
  source 1..20: mol_type = other DNA
caggtatgtctgcctgagag

SEQ ID NO: 44605 - DNA, 20 bp, synthetic construct
  misc_feature 1..20: note = chemically synthesized
  source 1..20: mol_type = other DNA
tatgtctgcctgagagcagt

SEQ ID NO: 44606 - DNA, 20 bp, synthetic construct
  misc_feature 1..20: note = chemically synthesized
  source 1..20: mol_type = other DNA
tgtctgcctgagagcagttg

SEQ ID NO: 44607 - DNA, 20 bp, synthetic construct
  misc_feature 1..20: note = chemically synthesized
  source 1..20: mol_type = other DNA
ctgcctgagagcagttggag

SEQ ID NO: 44608 - DNA, 20 bp, synthetic construct
  misc_feature 1..20: note = chemically synthesized
  source 1..20: mol_type = other DNA
tgagagcagttggagcagac

SEQ ID NO: 44609 - DNA, 20 bp, synthetic construct
  misc_feature 1..20: note = chemically synthesized
  source 1..20: mol_type = other DNA
agagcagttggagcagacaa

SEQ ID NO: 44610 - DNA, 20 bp, synthetic construct
  misc_feature 1..20: note = chemically synthesized
  source 1..20: mol_type = other DNA
aaaaaccaaacaaatcacca

SEQ ID NO: 44611 - DNA, 20 bp, synthetic construct
  misc_feature 1..20: note = chemically synthesized
  source 1..20: mol_type = other DNA
accaaacaaatcaccataga

SEQ ID NO: 44612 - DNA, 20 bp, synthetic construct
  misc_feature 1..20: note = chemically synthesized
  source 1..20: mol_type = other DNA
aaacaaatcaccatagatag

SEQ ID NO: 44613 - DNA, 20 bp, synthetic construct
  misc_feature 1..20: note = chemically synthesized
  source 1..20: mol_type = other DNA
tgtcccctccaaatctcatg

SEQ ID NO: 44614 - DNA, 20 bp, synthetic construct
  misc_feature 1..20: note = chemically synthesized
  source 1..20: mol_type = other DNA
ccaaatctcatgtggaaatt

SEQ ID NO: 44615 - DNA, 20 bp, synthetic construct
  misc_feature 1..20: note = chemically synthesized
  source 1..20: mol_type = other DNA
tcatgtggaaatttggtcct

SEQ ID NO: 44616 - DNA, 20 bp, synthetic construct
  misc_feature 1..20: note = chemically synthesized
  source 1..20: mol_type = other DNA
ggaaatttggtcctcagtgt

SEQ ID NO: 44617 - DNA, 20 bp, synthetic construct
  misc_feature 1..20: note = chemically synthesized
  source 1..20: mol_type = other DNA
aatttggtcctcagtgttgg

SEQ ID NO: 44618 - DNA, 20 bp, synthetic construct
  misc_feature 1..20: note = chemically synthesized
  source 1..20: mol_type = other DNA
ttggtcctcagtgttggaag

SEQ ID NO: 44619 - DNA, 20 bp, synthetic construct
  misc_feature 1..20: note = chemically synthesized
  source 1..20: mol_type = other DNA
tggtcctcagtgttggaagt

SEQ ID NO: 44620 - DNA, 20 bp, synthetic construct
  misc_feature 1..20: note = chemically synthesized
  source 1..20: mol_type = other DNA
ggtcctcagtgttggaagtg

SEQ ID NO: 44621 - DNA, 20 bp, synthetic construct
  misc_feature 1..20: note = chemically synthesized
  source 1..20: mol_type = other DNA
gtgttggaagtggggcctaa

SEQ ID NO: 44622 - DNA, 20 bp, synthetic construct
  misc_feature 1..20: note = chemically synthesized
  source 1..20: mol_type = other DNA
tgttggaagtggggcctaat

SEQ ID NO: 44623 - DNA, 20 bp, synthetic construct
  misc_feature 1..20: note = chemically synthesized
  source 1..20: mol_type = other DNA
ttggaagtggggcctaatgg

SEQ ID NO: 44624 - DNA, 20 bp, synthetic construct
  misc_feature 1..20: note = chemically synthesized
  source 1..20: mol_type = other DNA
tggaagtggggcctaatggg

SEQ ID NO: 44625 - DNA, 20 bp, synthetic construct
  misc_feature 1..20: note = chemically synthesized
  source 1..20: mol_type = other DNA
ggggcctaatgggaggtgtt

SEQ ID NO: 44626 - DNA, 20 bp, synthetic construct
  misc_feature 1..20: note = chemically synthesized
  source 1..20: mol_type = other DNA
gggcctaatgggaggtgttt

SEQ ID NO: 44627 - DNA, 20 bp, synthetic construct
  misc_feature 1..20: note = chemically synthesized
  source 1..20: mol_type = other DNA
aatgggaggtgtttgggtca

SEQ ID NO: 44628 - DNA, 20 bp, synthetic construct
  misc_feature 1..20: note = chemically synthesized
  source 1..20: mol_type = other DNA
atgggaggtgtttgggtcat

SEQ ID NO: 44629 - DNA, 20 bp, synthetic construct
  misc_feature 1..20: note = chemically synthesized
  source 1..20: mol_type = other DNA
tgggaggtgtttgggtcatg

SEQ ID NO: 44630 - DNA, 20 bp, synthetic construct
  misc_feature 1..20: note = chemically synthesized
  source 1..20: mol_type = other DNA
gggaggtgtttgggtcatgg

SEQ ID NO: 44631 - DNA, 20 bp, synthetic construct
  misc_feature 1..20: note = chemically synthesized
  source 1..20: mol_type = other DNA
gaggtgtttgggtcatgggg

SEQ ID NO: 44632 - DNA, 20 bp, synthetic construct
  misc_feature 1..20: note = chemically synthesized
  source 1..20: mol_type = other DNA
aggtgtttgggtcatggggg

SEQ ID NO: 44633 - DNA, 20 bp, synthetic construct
  misc_feature 1..20: note = chemically synthesized
  source 1..20: mol_type = other DNA
tgggggaggaacccctgtga

SEQ ID NO: 44634 - DNA, 20 bp, synthetic construct
  misc_feature 1..20: note = chemically synthesized
  source 1..20: mol_type = other DNA
gggggaggaacccctgtgaa

SEQ ID NO: 44635 - DNA, 20 bp, synthetic construct
  misc_feature 1..20: note = chemically synthesized
  source 1..20: mol_type = other DNA
aggaacccctgtgaaaggct

SEQ ID NO: 44636 - DNA, 20 bp, synthetic construct
  misc_feature 1..20: note = chemically synthesized
  source 1..20: mol_type = other DNA
ggtgccgtccttgtgataat

SEQ ID NO: 44637 - DNA, 20 bp, synthetic construct
  misc_feature 1..20: note = chemically synthesized
  source 1..20: mol_type = other DNA
ccgtccttgtgataatgagt

SEQ ID NO: 44638 - DNA, 20 bp, synthetic construct
  misc_feature 1..20: note = chemically synthesized
  source 1..20: mol_type = other DNA
tcccgctatgatttcccttg

SEQ ID NO: 44639 - DNA, 20 bp, synthetic construct
  misc_feature 1..20: note = chemically synthesized
  source 1..20: mol_type = other DNA
cccgctatgatttcccttga

SEQ ID NO: 44640 - DNA, 20 bp, synthetic construct
  misc_feature 1..20: note = chemically synthesized
  source 1..20: mol_type = other DNA
cttgaaggctgattattaaa

SEQ ID NO: 44641 - DNA, 20 bp, synthetic construct
  misc_feature 1..20: note = chemically synthesized
  source 1..20: mol_type = other DNA
tgaaggctgattattaaaaa

SEQ ID NO: 44642 - DNA, 20 bp, synthetic construct
  misc_feature 1..20: note = chemically synthesized
  source 1..20: mol_type = other DNA
gctgattattaaaaagagct

SEQ ID NO: 44643 - DNA, 20 bp, synthetic construct
  misc_feature 1..20: note = chemically synthesized
  source 1..20: mol_type = other DNA
gtgattgatctctgcacatg

SEQ ID NO: 44644 - DNA, 20 bp, synthetic construct
  misc_feature 1..20: note = chemically synthesized
  source 1..20: mol_type = other DNA
tgattgatctctgcacatgt

SEQ ID NO: 44645 - DNA, 20 bp, synthetic construct
  misc_feature 1..20: note = chemically synthesized
  source 1..20: mol_type = other DNA
tccccttcaccttctgccat

SEQ ID NO: 44646 - DNA, 20 bp, synthetic construct
  misc_feature 1..20: note = chemically synthesized
  source 1..20: mol_type = other DNA
tcaccttctgccatcagtga

SEQ ID NO: 44647 - DNA, 20 bp, synthetic construct
  misc_feature 1..20: note = chemically synthesized
  source 1..20: mol_type = other DNA
ccttctgccatcagtgaaag

SEQ ID NO: 44648 - DNA, 20 bp, synthetic construct
  misc_feature 1..20: note = chemically synthesized
  source 1..20: mol_type = other DNA
gccatcagtgaaagcagctt

SEQ ID NO: 44649 - DNA, 20 bp, synthetic construct
  misc_feature 1..20: note = chemically synthesized
  source 1..20: mol_type = other DNA
ccatcagtgaaagcagctta

SEQ ID NO: 44650 - DNA, 20 bp, synthetic construct
  misc_feature 1..20: note = chemically synthesized
  source 1..20: mol_type = other DNA
aagcagcttaaggccctcac

SEQ ID NO: 44651 - DNA, 20 bp, synthetic construct
  misc_feature 1..20: note = chemically synthesized
  source 1..20: mol_type = other DNA
cagcttaaggccctcaccag

SEQ ID NO: 44652 - DNA, 20 bp, synthetic construct
  misc_feature 1..20: note = chemically synthesized
  source 1..20: mol_type = other DNA
cttaaggccctcaccagaag

SEQ ID NO: 44653 - DNA, 20 bp, synthetic construct
  misc_feature 1..20: note = chemically synthesized
  source 1..20: mol_type = other DNA
ccctcaccagaagcagatgc

SEQ ID NO: 44654 - DNA, 20 bp, synthetic construct
  misc_feature 1..20: note = chemically synthesized
  source 1..20: mol_type = other DNA
gatgctggtgccatgcttcc

SEQ ID NO: 44655 - DNA, 20 bp, synthetic construct
  misc_feature 1..20: note = chemically synthesized
  source 1..20: mol_type = other DNA
tgctggtgccatgcttcctg

SEQ ID NO: 44656 - DNA, 20 bp, synthetic construct
  misc_feature 1..20: note = chemically synthesized
  source 1..20: mol_type = other DNA
ctggtgccatgcttcctgga

SEQ ID NO: 44657 - DNA, 20 bp, synthetic construct
  misc_feature 1..20: note = chemically synthesized
  source 1..20: mol_type = other DNA
catgcttcctggagagcttg

SEQ ID NO: 44658 - DNA, 20 bp, synthetic construct
  misc_feature 1..20: note = chemically synthesized
  source 1..20: mol_type = other DNA
tggagagcttgcagaatcat

SEQ ID NO: 44659 - DNA, 20 bp, synthetic construct
  misc_feature 1..20: note = chemically synthesized
  source 1..20: mol_type = other DNA
ccttgtaaattactcacctt

SEQ ID NO: 44660 - DNA, 20 bp, synthetic construct
  misc_feature 1..20: note = chemically synthesized
  source 1..20: mol_type = other DNA
cttgtaaattactcaccttc

SEQ ID NO: 44661 - DNA, 20 bp, synthetic construct
  misc_feature 1..20: note = chemically synthesized
  source 1..20: mol_type = other DNA
ccttcaggtattcctttata

SEQ ID NO: 44662 - DNA, 20 bp, synthetic construct
  misc_feature 1..20: note = chemically synthesized
  source 1..20: mol_type = other DNA
tcctttatatagcaacacaa

SEQ ID NO: 44663 - DNA, 20 bp, synthetic construct
  misc_feature 1..20: note = chemically synthesized
  source 1..20: mol_type = other DNA
cctttatatagcaacacaaa

SEQ ID NO: 44664 - DNA, 20 bp, synthetic construct
  misc_feature 1..20: note = chemically synthesized
  source 1..20: mol_type = other DNA
tatagcaacacaaaaggact

SEQ ID NO: 44665 - DNA, 20 bp, synthetic construct
  misc_feature 1..20: note = chemically synthesized
  source 1..20: mol_type = other DNA
gcaacacaaaaggactaaga

SEQ ID NO: 44666 - DNA, 20 bp, synthetic construct
  misc_feature 1..20: note = chemically synthesized
  source 1..20: mol_type = other DNA
acacaaaaggactaagacag

SEQ ID NO: 44667 - DNA, 20 bp, synthetic construct
  misc_feature 1..20: note = chemically synthesized
  source 1..20: mol_type = other DNA
cttgacttttctctctcttt

SEQ ID NO: 44668 - DNA, 20 bp, synthetic construct
  misc_feature 1..20: note = chemically synthesized
  source 1..20: mol_type = other DNA
gacttttctctctctttaag

SEQ ID NO: 44669 - DNA, 20 bp, synthetic construct
  misc_feature 1..20: note = chemically synthesized
  source 1..20: mol_type = other DNA
aagtgttgcctttgctcact

SEQ ID NO: 44670 - DNA, 20 bp, synthetic construct
  misc_feature 1..20: note = chemically synthesized
  source 1..20: mol_type = other DNA
atcccttctgcctgcatttg

SEQ ID NO: 44671 - DNA, 20 bp, synthetic construct
  misc_feature 1..20: note = chemically synthesized
  source 1..20: mol_type = other DNA
cccttctgcctgcatttgta

SEQ ID NO: 44672 - DNA, 20 bp, synthetic construct
  misc_feature 1..20: note = chemically synthesized
  source 1..20: mol_type = other DNA
gcctgcatttgtagagcatc

SEQ ID NO: 44673 - DNA, 20 bp, synthetic construct
  misc_feature 1..20: note = chemically synthesized
  source 1..20: mol_type = other DNA
gcatttgtagagcatctgga

SEQ ID NO: 44674 - DNA, 20 bp, synthetic construct
  misc_feature 1..20: note = chemically synthesized
  source 1..20: mol_type = other DNA
catttgtagagcatctggat

SEQ ID NO: 44675 - DNA, 20 bp, synthetic construct
  misc_feature 1..20: note = chemically synthesized
  source 1..20: mol_type = other DNA
tttgtagagcatctggatgg

SEQ ID NO: 44676 - DNA, 20 bp, synthetic construct
  misc_feature 1..20: note = chemically synthesized
  source 1..20: mol_type = other DNA
accgtcactcttgactttcc

SEQ ID NO: 44677 - DNA, 20 bp, synthetic construct
  misc_feature 1..20: note = chemically synthesized
  source 1..20: mol_type = other DNA
gtcactcttgactttcccag

SEQ ID NO: 44678 - DNA, 20 bp, synthetic construct
  misc_feature 1..20: note = chemically synthesized
  source 1..20: mol_type = other DNA
tcactcttgactttcccagc

SEQ ID NO: 44679 - DNA, 20 bp, synthetic construct
  misc_feature 1..20: note = chemically synthesized
  source 1..20: mol_type = other DNA
ttcccagcaggcctatgtca

SEQ ID NO: 44680 - DNA, 20 bp, synthetic construct
  misc_feature 1..20: note = chemically synthesized
  source 1..20: mol_type = other DNA
tcccagcaggcctatgtcat

SEQ ID NO: 44681 - DNA, 20 bp, synthetic construct
  misc_feature 1..20: note = chemically synthesized
  source 1..20: mol_type = other DNA
ggcctatgtcataggtactg

SEQ ID NO: 44682 - DNA, 20 bp, synthetic construct
  misc_feature 1..20: note = chemically synthesized
  source 1..20: mol_type = other DNA
gtactgtggtctctacaata

SEQ ID NO: 44683 - DNA, 20 bp, synthetic construct
  misc_feature 1..20: note = chemically synthesized
  source 1..20: mol_type = other DNA
ctgtggtctctacaatacag

SEQ ID NO: 44684 - DNA, 20 bp, synthetic construct
  misc_feature 1..20: note = chemically synthesized
  source 1..20: mol_type = other DNA
gtggtctctacaatacagca

SEQ ID NO: 44685 - DNA, 20 bp, synthetic construct
  misc_feature 1..20: note = chemically synthesized
  source 1..20: mol_type = other DNA
tggtctctacaatacagcag

SEQ ID NO: 44686 - DNA, 20 bp, synthetic construct
  misc_feature 1..20: note = chemically synthesized
  source 1..20: mol_type = other DNA
acaatacagcagaggtatct

SEQ ID NO: 44687 - DNA, 20 bp, synthetic construct
  misc_feature 1..20: note = chemically synthesized
  source 1..20: mol_type = other DNA
caatacagcagaggtatctg

SEQ ID NO: 44688 - DNA, 20 bp, synthetic construct
  misc_feature 1..20: note = chemically synthesized
  source 1..20: mol_type = other DNA
gcagaggtatctgaggctcc

SEQ ID NO: 44689 - DNA, 20 bp, synthetic construct
  misc_feature 1..20: note = chemically synthesized
  source 1..20: mol_type = other DNA
agaggtatctgaggctccga

SEQ ID NO: 44690 - DNA, 20 bp, synthetic construct
  misc_feature 1..20: note = chemically synthesized
  source 1..20: mol_type = other DNA
gaggtatctgaggctccgag

SEQ ID NO: 44691 - DNA, 20 bp, synthetic construct
  misc_feature 1..20: note = chemically synthesized
  source 1..20: mol_type = other DNA
atctgaggctccgagaggtt

SEQ ID NO: 44692 - DNA, 20 bp, synthetic construct
  misc_feature 1..20: note = chemically synthesized
  source 1..20: mol_type = other DNA
gaggttgagtgacttgctca

SEQ ID NO: 44693 - DNA, 20 bp, synthetic construct
  misc_feature 1..20: note = chemically synthesized
  source 1..20: mol_type = other DNA
cttgctcatggctgcacaac

SEQ ID NO: 44694 - DNA, 20 bp, synthetic construct
  misc_feature 1..20: note = chemically synthesized
  source 1..20: mol_type = other DNA
gctgcacaaccagtaaatat

SEQ ID NO: 44695 - DNA, 20 bp, synthetic construct
  misc_feature 1..20: note = chemically synthesized
  source 1..20: mol_type = other DNA
tgcacaaccagtaaatattg

SEQ ID NO: 44696 - DNA, 20 bp, synthetic construct
  misc_feature 1..20: note = chemically synthesized
  source 1..20: mol_type = other DNA
caaccagtaaatattggagc

SEQ ID NO: 44697 - DNA, 20 bp, synthetic construct
  misc_feature 1..20: note = chemically synthesized
  source 1..20: mol_type = other DNA
taaatattggagctggaatt

SEQ ID NO: 44698 - DNA, 20 bp, synthetic construct
  misc_feature 1..20: note = chemically synthesized
  source 1..20: mol_type = other DNA
aaatattggagctggaattc

SEQ ID NO: 44699 - DNA, 20 bp, synthetic construct
  misc_feature 1..20: note = chemically synthesized
  source 1..20: mol_type = other DNA
ggagctggaattcaggtcca

SEQ ID NO: 44700 - DNA, 20 bp, synthetic construct
  misc_feature 1..20: note = chemically synthesized
  source 1..20: mol_type = other DNA
aattcaggtccacggtttcc

SEQ ID NO: 44701 - DNA, 20 bp, synthetic construct
  misc_feature 1..20: note = chemically synthesized
  source 1..20: mol_type = other DNA
tccacggtttcctggctcca

SEQ ID NO: 44702 - DNA, 20 bp, synthetic construct
  misc_feature 1..20: note = chemically synthesized
  source 1..20: mol_type = other DNA
ttccctcaatttattctgac

SEQ ID NO: 44703 - DNA, 20 bp, synthetic construct
  misc_feature 1..20: note = chemically synthesized
  source 1..20: mol_type = other DNA
tccctcaatttattctgact

SEQ ID NO: 44704 - DNA, 20 bp, synthetic construct
  misc_feature 1..20: note = chemically synthesized
  source 1..20: mol_type = other DNA
ccctcaatttattctgactg

SEQ ID NO: 44705 - DNA, 20 bp, synthetic construct
  misc_feature 1..20: note = chemically synthesized
  source 1..20: mol_type = other DNA
aatttattctgactggggca

SEQ ID NO: 44706 - DNA, 20 bp, synthetic construct
  misc_feature 1..20: note = chemically synthesized
  source 1..20: mol_type = other DNA
atttattctgactggggcat

SEQ ID NO: 44707 - DNA, 20 bp, synthetic construct
  misc_feature 1..20: note = chemically synthesized
  source 1..20: mol_type = other DNA
tttattctgactggggcatg

SEQ ID NO: 44708 - DNA, 20 bp, synthetic construct
  misc_feature 1..20: note = chemically synthesized
  source 1..20: mol_type = other DNA
ttattctgactggggcatgg

SEQ ID NO: 44709 - DNA, 20 bp, synthetic construct
  misc_feature 1..20: note = chemically synthesized
  source 1..20: mol_type = other DNA
attctgactggggcatgggg

SEQ ID NO: 44710 - DNA, 20 bp, synthetic construct
  misc_feature 1..20: note = chemically synthesized
  source 1..20: mol_type = other DNA
ttctgactggggcatggggg

SEQ ID NO: 44711 - DNA, 20 bp, synthetic construct
  misc_feature 1..20: note = chemically synthesized
  source 1..20: mol_type = other DNA
tctgactggggcatggggga

SEQ ID NO: 44712 - DNA, 20 bp, synthetic construct
  misc_feature 1..20: note = chemically synthesized
  source 1..20: mol_type = other DNA
ctgactggggcatgggggag

SEQ ID NO: 44713 - DNA, 20 bp, synthetic construct
  misc_feature 1..20: note = chemically synthesized
  source 1..20: mol_type = other DNA
tgactggggcatgggggagg

SEQ ID NO: 44714 - DNA, 20 bp, synthetic construct
  misc_feature 1..20: note = chemically synthesized
  source 1..20: mol_type = other DNA
ctggggcatgggggaggggg

SEQ ID NO: 44715 - DNA, 20 bp, synthetic construct
  misc_feature 1..20: note = chemically synthesized
  source 1..20: mol_type = other DNA
atgggggagggggtggcctt

SEQ ID NO: 44716 - DNA, 20 bp, synthetic construct
  misc_feature 1..20: note = chemically synthesized
  source 1..20: mol_type = other DNA
tgggggagggggtggccttt

SEQ ID NO: 44717 - DNA, 20 bp, synthetic construct
  misc_feature 1..20: note = chemically synthesized
  source 1..20: mol_type = other DNA
gggagggggtggcctttggg

SEQ ID NO: 44718 - DNA, 20 bp, synthetic construct
  misc_feature 1..20: note = chemically synthesized
  source 1..20: mol_type = other DNA
ggagggggtggcctttgggc

SEQ ID NO: 44719 - DNA, 20 bp, synthetic construct
  misc_feature 1..20: note = chemically synthesized
  source 1..20: mol_type = other DNA
gagggggtggcctttgggca

SEQ ID NO: 44720 - DNA, 20 bp, synthetic construct
  misc_feature 1..20: note = chemically synthesized
  source 1..20: mol_type = other DNA
tggcctttgggcagggccac

SEQ ID NO: 44721 - DNA, 20 bp, synthetic construct
  misc_feature 1..20: note = chemically synthesized
  source 1..20: mol_type = other DNA
ggcctttgggcagggccacc

SEQ ID NO: 44722 - DNA, 20 bp, synthetic construct
  misc_feature 1..20: note = chemically synthesized
  source 1..20: mol_type = other DNA
cctttgggcagggccaccag

SEQ ID NO: 44723 - DNA, 20 bp, synthetic construct
  misc_feature 1..20: note = chemically synthesized
  source 1..20: mol_type = other DNA
gcagggccaccaggagcgac

SEQ ID NO: 44724 - DNA, 20 bp, synthetic construct
  misc_feature 1..20: note = chemically synthesized
  source 1..20: mol_type = other DNA
cagggccaccaggagcgacc

SEQ ID NO: 44725 - DNA, 20 bp, synthetic construct
  misc_feature 1..20: note = chemically synthesized
  source 1..20: mol_type = other DNA
accaggagcgaccaggcccg

SEQ ID NO: 44726 - DNA, 20 bp, synthetic construct
  misc_feature 1..20: note = chemically synthesized
  source 1..20: mol_type = other DNA
caggagcgaccaggcccgta

SEQ ID NO: 44727 - DNA, 20 bp, synthetic construct
  misc_feature 1..20: note = chemically synthesized
  source 1..20: mol_type = other DNA
ggagcgaccaggcccgtaga

SEQ ID NO: 44728 - DNA, 20 bp, synthetic construct
  misc_feature 1..20: note = chemically synthesized
  source 1..20: mol_type = other DNA
cgaccaggcccgtagagagc

SEQ ID NO: 44729 - DNA, 20 bp, synthetic construct
  misc_feature 1..20: note = chemically synthesized
  source 1..20: mol_type = other DNA
gaccaggcccgtagagagct

SEQ ID NO: 44730 - DNA, 20 bp, synthetic construct
  misc_feature 1..20: note = chemically synthesized
  source 1..20: mol_type = other DNA
ggcccgtagagagctgggtg

SEQ ID NO: 44731 - DNA, 20 bp, synthetic construct
  misc_feature 1..20: note = chemically synthesized
  source 1..20: mol_type = other DNA
gcccgtagagagctgggtgc

SEQ ID NO: 44732 - DNA, 20 bp, synthetic construct
  misc_feature 1..20: note = chemically synthesized
  source 1..20: mol_type = other DNA
tagagagctgggtgcaggta

SEQ ID NO: 44733 - DNA, 20 bp, synthetic construct
  misc_feature 1..20: note = chemically synthesized
  source 1..20: mol_type = other DNA
gagagctgggtgcaggtaca

SEQ ID NO: 44734 - DNA, 20 bp, synthetic construct
  misc_feature 1..20: note = chemically synthesized
  source 1..20: mol_type = other DNA
agagctgggtgcaggtacag

SEQ ID NO: 44735 - DNA, 20 bp, synthetic construct
  misc_feature 1..20: note = chemically synthesized
  source 1..20: mol_type = other DNA
acagaggaaaacctgttgtc

SEQ ID NO: 44736 - DNA, 20 bp, synthetic construct
  misc_feature 1..20: note = chemically synthesized
  source 1..20: mol_type = other DNA
ggaaaacctgttgtcgagtg

SEQ ID NO: 44737 - DNA, 20 bp, synthetic construct
  misc_feature 1..20: note = chemically synthesized
  source 1..20: mol_type = other DNA
ctgttgtcgagtgtggcccg

SEQ ID NO: 44738 - DNA, 20 bp, synthetic construct
  misc_feature 1..20: note = chemically synthesized
  source 1..20: mol_type = other DNA
agttcccatttttgcctgaa

SEQ ID NO: 44739 - DNA, 20 bp, synthetic construct
  misc_feature 1..20: note = chemically synthesized
  source 1..20: mol_type = other DNA
tgcctgaatggcacatttga

SEQ ID NO: 44740 - DNA, 20 bp, synthetic construct
  misc_feature 1..20: note = chemically synthesized
  source 1..20: mol_type = other DNA
tataaccatgtgaataataa

SEQ ID NO: 44741 - DNA, 20 bp, synthetic construct
  misc_feature 1..20: note = chemically synthesized
  source 1..20: mol_type = other DNA
accatgtgaataataatagt

SEQ ID NO: 44742 - DNA, 20 bp, synthetic construct
  misc_feature 1..20: note = chemically synthesized
  source 1..20: mol_type = other DNA
taataatagttggcctatat

SEQ ID NO: 44743 - DNA, 20 bp, synthetic construct
  misc_feature 1..20: note = chemically synthesized
  source 1..20: mol_type = other DNA
gagttctttaatttgctttt

SEQ ID NO: 44744 - DNA, 20 bp, synthetic construct
  misc_feature 1..20: note = chemically synthesized
  source 1..20: mol_type = other DNA
tttgctttttggtccgcatt

SEQ ID NO: 44745 - DNA, 20 bp, synthetic construct
  misc_feature 1..20: note = chemically synthesized
  source 1..20: mol_type = other DNA
tctcttttgttgtaatttgt

SEQ ID NO: 44746 - DNA, 20 bp, synthetic construct
  misc_feature 1..20: note = chemically synthesized
  source 1..20: mol_type = other DNA
cttttgttgtaatttgtaag

SEQ ID NO: 44747 - DNA, 20 bp, synthetic construct
  misc_feature 1..20: note = chemically synthesized
  source 1..20: mol_type = other DNA
ttttgttgtaatttgtaagt

SEQ ID NO: 44748 - DNA, 20 bp, synthetic construct
  misc_feature 1..20: note = chemically synthesized
  source 1..20: mol_type = other DNA
tttgttgtaatttgtaagta

SEQ ID NO: 44749 - DNA, 20 bp, synthetic construct
  misc_feature 1..20: note = chemically synthesized
  source 1..20: mol_type = other DNA
ttgttgtaatttgtaagtag

SEQ ID NO: 44750 - DNA, 20 bp, synthetic construct
  misc_feature 1..20: note = chemically synthesized
  source 1..20: mol_type = other DNA
tgtaatttgtaagtaggggt

SEQ ID NO: 44751 - DNA, 20 bp, synthetic construct
  misc_feature 1..20: note = chemically synthesized
  source 1..20: mol_type = other DNA
ttgtaagtaggggtgagata

SEQ ID NO: 44752 - DNA, 20 bp, synthetic construct
  misc_feature 1..20: note = chemically synthesized
  source 1..20: mol_type = other DNA
ggggtgagataaagtacacc

SEQ ID NO: 44753 - DNA, 20 bp, synthetic construct
  misc_feature 1..20: note = chemically synthesized
  source 1..20: mol_type = other DNA
gggtgagataaagtacacct

SEQ ID NO: 44754 - DNA, 20 bp, synthetic construct
  misc_feature 1..20: note = chemically synthesized
  source 1..20: mol_type = other DNA
ggtgagataaagtacaccta

SEQ ID NO: 44755 - DNA, 20 bp, synthetic construct
  misc_feature 1..20: note = chemically synthesized
  source 1..20: mol_type = other DNA
aaagtacacctagggtttgc

SEQ ID NO: 44756 - DNA, 20 bp, synthetic construct
  misc_feature 1..20: note = chemically synthesized
  source 1..20: mol_type = other DNA
aagtacacctagggtttgct

SEQ ID NO: 44757 - DNA, 20 bp, synthetic construct
  misc_feature 1..20: note = chemically synthesized
  source 1..20: mol_type = other DNA
tcatcatgttcctccttgca

SEQ ID NO: 44758 - DNA, 20 bp, synthetic construct
  misc_feature 1..20: note = chemically synthesized
  source 1..20: mol_type = other DNA
catcatgttcctccttgcat

SEQ ID NO: 44759 - DNA, 20 bp, synthetic construct
  misc_feature 1..20: note = chemically synthesized
  source 1..20: mol_type = other DNA
atcatgttcctccttgcatg

SEQ ID NO: 44760 - DNA, 20 bp, synthetic construct
  misc_feature 1..20: note = chemically synthesized
  source 1..20: mol_type = other DNA
tgttcctccttgcatggggc

SEQ ID NO: 44761 - DNA, 20 bp, synthetic construct
  misc_feature 1..20: note = chemically synthesized
  source 1..20: mol_type = other DNA
gttcctccttgcatggggcc

SEQ ID NO: 44762 - DNA, 20 bp, synthetic construct
  misc_feature 1..20: note = chemically synthesized
  source 1..20: mol_type = other DNA
ttgcatggggccaggatccg

SEQ ID NO: 44763 - DNA, 20 bp, synthetic construct
  misc_feature 1..20: note = chemically synthesized
  source 1..20: mol_type = other DNA
gcatggggccaggatccgtg

SEQ ID NO: 44764 - DNA, 20 bp, synthetic construct
  misc_feature 1..20: note = chemically synthesized
  source 1..20: mol_type = other DNA
catggggccaggatccgtgg

SEQ ID NO: 44765 - DNA, 20 bp, synthetic construct
  misc_feature 1..20: note = chemically synthesized
  source 1..20: mol_type = other DNA
caggatccgtggaggttgcc

SEQ ID NO: 44766 - DNA, 20 bp, synthetic construct
  misc_feature 1..20: note = chemically synthesized
  source 1..20: mol_type = other DNA
gaggttgcctggcacctacg

SEQ ID NO: 44767 - DNA, 20 bp, synthetic construct
  misc_feature 1..20: note = chemically synthesized
  source 1..20: mol_type = other DNA
gttgcctggcacctacgtgg

SEQ ID NO: 44768 - DNA, 20 bp, synthetic construct
  misc_feature 1..20: note = chemically synthesized
  source 1..20: mol_type = other DNA
gcacctacgtggtggtgctg

SEQ ID NO: 44769 - DNA, 20 bp, synthetic construct
  misc_feature 1..20: note = chemically synthesized
  source 1..20: mol_type = other DNA
cacctacgtggtggtgctga

SEQ ID NO: 44770 - DNA, 20 bp, synthetic construct
  misc_feature 1..20: note = chemically synthesized
  source 1..20: mol_type = other DNA
cctacgtggtggtgctgaag

SEQ ID NO: 44771 - DNA, 20 bp, synthetic construct
  misc_feature 1..20: note = chemically synthesized
  source 1..20: mol_type = other DNA
ctacgtggtggtgctgaagg

SEQ ID NO: 44772 - DNA, 20 bp, synthetic construct
  misc_feature 1..20: note = chemically synthesized
  source 1..20: mol_type = other DNA
acgtggtggtgctgaaggag

SEQ ID NO: 44773 - DNA, 20 bp, synthetic construct
  misc_feature 1..20: note = chemically synthesized
  source 1..20: mol_type = other DNA
aggaggagacccacctctcg

SEQ ID NO: 44774 - DNA, 20 bp, synthetic construct
  misc_feature 1..20: note = chemically synthesized
  source 1..20: mol_type = other DNA
ggagacccacctctcgcagt

SEQ ID NO: 44775 - DNA, 20 bp, synthetic construct
  misc_feature 1..20: note = chemically synthesized
  source 1..20: mol_type = other DNA
agacccacctctcgcagtca

SEQ ID NO: 44776 - DNA, 20 bp, synthetic construct
  misc_feature 1..20: note = chemically synthesized
  source 1..20: mol_type = other DNA
agcgcactgcccgccgcctg

SEQ ID NO: 44777 - DNA, 20 bp, synthetic construct
  misc_feature 1..20: note = chemically synthesized
  source 1..20: mol_type = other DNA
gcgcactgcccgccgcctgc

SEQ ID NO: 44778 - DNA, 20 bp, synthetic construct
  misc_feature 1..20: note = chemically synthesized
  source 1..20: mol_type = other DNA
ctgcccgccgcctgcaggcc

SEQ ID NO: 44779 - DNA, 20 bp, synthetic construct
  misc_feature 1..20: note = chemically synthesized
  source 1..20: mol_type = other DNA
tgcccgccgcctgcaggccc

SEQ ID NO: 44780 - DNA, 20 bp, synthetic construct
  misc_feature 1..20: note = chemically synthesized
  source 1..20: mol_type = other DNA
tgcaggcccaggctgcccgc

SEQ ID NO: 44781 - DNA, 20 bp, synthetic construct
  misc_feature 1..20: note = chemically synthesized
  source 1..20: mol_type = other DNA
gcaggcccaggctgcccgcc

SEQ ID NO: 44782 - DNA, 20 bp, synthetic construct
  misc_feature 1..20: note = chemically synthesized
  source 1..20: mol_type = other DNA
caggcccaggctgcccgccg

SEQ ID NO: 44783 - DNA, 20 bp, synthetic construct
  misc_feature 1..20: note = chemically synthesized
  source 1..20: mol_type = other DNA
cccgccggggatacctcacc

SEQ ID NO: 44784 - DNA, 20 bp, synthetic construct
  misc_feature 1..20: note = chemically synthesized
  source 1..20: mol_type = other DNA
aagatcctgcatgtcttcca

SEQ ID NO: 44785 - DNA, 20 bp, synthetic construct
  misc_feature 1..20: note = chemically synthesized
  source 1..20: mol_type = other DNA
gtcttccatggccttcttcc

SEQ ID NO: 44786 - DNA, 20 bp, synthetic construct
  misc_feature 1..20: note = chemically synthesized
  source 1..20: mol_type = other DNA
tggccttcttcctggcttcc

SEQ ID NO: 44787 - DNA, 20 bp, synthetic construct
  misc_feature 1..20: note = chemically synthesized
  source 1..20: mol_type = other DNA
ttcttcctggcttcctggtg

SEQ ID NO: 44788 - DNA, 20 bp, synthetic construct
  misc_feature 1..20: note = chemically synthesized
  source 1..20: mol_type = other DNA
cctggcttcctggtgaagat

SEQ ID NO: 44789 - DNA, 20 bp, synthetic construct
  misc_feature 1..20: note = chemically synthesized
  source 1..20: mol_type = other DNA
ggcttcctggtgaagatgag

SEQ ID NO: 44790 - DNA, 20 bp, synthetic construct
  misc_feature 1..20: note = chemically synthesized
  source 1..20: mol_type = other DNA
gaagatgagtggcgacctgc

SEQ ID NO: 44791 - DNA, 20 bp, synthetic construct
  misc_feature 1..20: note = chemically synthesized
  source 1..20: mol_type = other DNA
agatgagtggcgacctgctg

SEQ ID NO: 44792 - DNA, 20 bp, synthetic construct
  misc_feature 1..20: note = chemically synthesized
  source 1..20: mol_type = other DNA
gagtggcgacctgctggagc

SEQ ID NO: 44793 - DNA, 20 bp, synthetic construct
  misc_feature 1..20: note = chemically synthesized
  source 1..20: mol_type = other DNA
ggcgacctgctggagctggt

SEQ ID NO: 44794 - DNA, 20 bp, synthetic construct
  misc_feature 1..20: note = chemically synthesized
  source 1..20: mol_type = other DNA
agctggtgagccaccctttt

SEQ ID NO: 44795 - DNA, 20 bp, synthetic construct
  misc_feature 1..20: note = chemically synthesized
  source 1..20: mol_type = other DNA
gctggtgagccacccttttt

SEQ ID NO: 44796 - DNA, 20 bp, synthetic construct
  misc_feature 1..20: note = chemically synthesized
  source 1..20: mol_type = other DNA
tgagccaccctttttgggaa

SEQ ID NO: 44797 - DNA, 20 bp, synthetic construct
  misc_feature 1..20: note = chemically synthesized
  source 1..20: mol_type = other DNA
ttgggaatggcacttcctga

SEQ ID NO: 44798 - DNA, 20 bp, synthetic construct
  misc_feature 1..20: note = chemically synthesized
  source 1..20: mol_type = other DNA
tgggaatggcacttcctgat

SEQ ID NO: 44799 - DNA, 20 bp, synthetic construct
  misc_feature 1..20: note = chemically synthesized
  source 1..20: mol_type = other DNA
gggaatggcacttcctgata

SEQ ID NO: 44800 - DNA, 20 bp, synthetic construct
  misc_feature 1..20: note = chemically synthesized
  source 1..20: mol_type = other DNA
atggcacttcctgatagggc

SEQ ID NO: 44801 - DNA, 20 bp, synthetic construct
  misc_feature 1..20: note = chemically synthesized
  source 1..20: mol_type = other DNA
tggcacttcctgatagggct

SEQ ID NO: 44802 - DNA, 20 bp, synthetic construct
  misc_feature 1..20: note = chemically synthesized
  source 1..20: mol_type = other DNA
ctgggccactgcatatacac

SEQ ID NO: 44803 - DNA, 20 bp, synthetic construct
  misc_feature 1..20: note = chemically synthesized
  source 1..20: mol_type = other DNA
tgggccactgcatatacact

SEQ ID NO: 44804 - DNA, 20 bp, synthetic construct
  misc_feature 1..20: note = chemically synthesized
  source 1..20: mol_type = other DNA
gggccactgcatatacactg

SEQ ID NO: 44805 - DNA, 20 bp, synthetic construct
  misc_feature 1..20: note = chemically synthesized
  source 1..20: mol_type = other DNA
tatacactggggactgtgct

SEQ ID NO: 44806 - DNA, 20 bp, synthetic construct
  misc_feature 1..20: note = chemically synthesized
  source 1..20: mol_type = other DNA
acactggggactgtgcttag

SEQ ID NO: 44807 - DNA, 20 bp, synthetic construct
  misc_feature 1..20: note = chemically synthesized
  source 1..20: mol_type = other DNA
cactggggactgtgcttagt

SEQ ID NO: 44808 - DNA, 20 bp, synthetic construct
  misc_feature 1..20: note = chemically synthesized
  source 1..20: mol_type = other DNA
gtaggcccattgctgaaaat

SEQ ID NO: 44809 - DNA, 20 bp, synthetic construct
  misc_feature 1..20: note = chemically synthesized
  source 1..20: mol_type = other DNA
ggcccattgctgaaaatcag

SEQ ID NO: 44810 - DNA, 20 bp, synthetic construct
  misc_feature 1..20: note = chemically synthesized
  source 1..20: mol_type = other DNA
gcccattgctgaaaatcaga

SEQ ID NO: 44811 - DNA, 20 bp, synthetic construct
  misc_feature 1..20: note = chemically synthesized
  source 1..20: mol_type = other DNA
cccattgctgaaaatcagaa

SEQ ID NO: 44812 - DNA, 20 bp, synthetic construct
  misc_feature 1..20: note = chemically synthesized
  source 1..20: mol_type = other DNA
ccattgctgaaaatcagaag

SEQ ID NO: 44813 - DNA, 20 bp, synthetic construct
  misc_feature 1..20: note = chemically synthesized
  source 1..20: mol_type = other DNA
tgctgaaaatcagaagggga

SEQ ID NO: 44814 - DNA, 20 bp, synthetic construct
  misc_feature 1..20: note = chemically synthesized
  source 1..20: mol_type = other DNA
gaaaatcagaaggggacagc

SEQ ID NO: 44815 - DNA, 20 bp, synthetic construct
  misc_feature 1..20: note = chemically synthesized
  source 1..20: mol_type = other DNA
ggggacagcaagtatgtatt

SEQ ID NO: 44816 - DNA, 20 bp, synthetic construct
  misc_feature 1..20: note = chemically synthesized
  source 1..20: mol_type = other DNA
agtatgtattgagcacttat

SEQ ID NO: 44817 - DNA, 20 bp, synthetic construct
  misc_feature 1..20: note = chemically synthesized
  source 1..20: mol_type = other DNA
gtatgtattgagcacttatc

SEQ ID NO: 44818 - DNA, 20 bp, synthetic construct
  misc_feature 1..20: note = chemically synthesized
  source 1..20: mol_type = other DNA
ttgagcacttatcgggtacc

SEQ ID NO: 44819 - DNA, 20 bp, synthetic construct
  misc_feature 1..20: note = chemically synthesized
  source 1..20: mol_type = other DNA
cacttatcgggtaccaagca

SEQ ID NO: 44820 - DNA, 20 bp, synthetic construct
  misc_feature 1..20: note = chemically synthesized
  source 1..20: mol_type = other DNA
gtaccaagcacagtaactac

SEQ ID NO: 44821 - DNA, 20 bp, synthetic construct
  misc_feature 1..20: note = chemically synthesized
  source 1..20: mol_type = other DNA
gtaactactggctttctgta

SEQ ID NO: 44822 - DNA, 20 bp, synthetic construct
  misc_feature 1..20: note = chemically synthesized
  source 1..20: mol_type = other DNA
ttctgtatagaattcccttt

SEQ ID NO: 44823 - DNA, 20 bp, synthetic construct
  misc_feature 1..20: note = chemically synthesized
  source 1..20: mol_type = other DNA
tatagaattccctttaagcc

SEQ ID NO: 44824 - DNA, 20 bp, synthetic construct
  misc_feature 1..20: note = chemically synthesized
  source 1..20: mol_type = other DNA
ctttaagcctggccatgccc

SEQ ID NO: 44825 - DNA, 20 bp, synthetic construct
  misc_feature 1..20: note = chemically synthesized
  source 1..20: mol_type = other DNA
taagcctggccatgccccag

SEQ ID NO: 44826 - DNA, 20 bp, synthetic construct
  misc_feature 1..20: note = chemically synthesized
  source 1..20: mol_type = other DNA
gtacgtctatcttcatttga

SEQ ID NO: 44827 - DNA, 20 bp, synthetic construct
  misc_feature 1..20: note = chemically synthesized
  source 1..20: mol_type = other DNA
tctatcttcatttgaaagac

SEQ ID NO: 44828 - DNA, 20 bp, synthetic construct
  misc_feature 1..20: note = chemically synthesized
  source 1..20: mol_type = other DNA
ctatcttcatttgaaagacg

SEQ ID NO: 44829 - DNA, 20 bp, synthetic construct
  misc_feature 1..20: note = chemically synthesized
  source 1..20: mol_type = other DNA
atcttcatttgaaagacgag

SEQ ID NO: 44830 - DNA, 20 bp, synthetic construct
  misc_feature 1..20: note = chemically synthesized
  source 1..20: mol_type = other DNA
tttgaaagacgaggagactg

SEQ ID NO: 44831 - DNA, 20 bp, synthetic construct
  misc_feature 1..20: note = chemically synthesized
  source 1..20: mol_type = other DNA
aagacgaggagactgaagtt

SEQ ID NO: 44832 - DNA, 20 bp, synthetic construct
  misc_feature 1..20: note = chemically synthesized
  source 1..20: mol_type = other DNA
gacgaggagactgaagttca

SEQ ID NO: 44833 - DNA, 20 bp, synthetic construct
  misc_feature 1..20: note = chemically synthesized
  source 1..20: mol_type = other DNA
acgaggagactgaagttcag

SEQ ID NO: 44834 - DNA, 20 bp, synthetic construct
  misc_feature 1..20: note = chemically synthesized
  source 1..20: mol_type = other DNA
cgaggagactgaagttcaga

SEQ ID NO: 44835 - DNA, 20 bp, synthetic construct
  misc_feature 1..20: note = chemically synthesized
  source 1..20: mol_type = other DNA
gaggagactgaagttcagag

SEQ ID NO: 44836 - DNA, 20 bp, synthetic construct
  misc_feature 1..20: note = chemically synthesized
  source 1..20: mol_type = other DNA
gaagttcagaggggaccaca

SEQ ID NO: 44837 - DNA, 20 bp, synthetic construct
  misc_feature 1..20: note = chemically synthesized
  source 1..20: mol_type = other DNA
ttcagaggggaccacacaga

SEQ ID NO: 44838 - DNA, 20 bp, synthetic construct
  misc_feature 1..20: note = chemically synthesized
  source 1..20: mol_type = other DNA
gaggggaccacacagacagc

SEQ ID NO: 44839 - DNA, 20 bp, synthetic construct
  misc_feature 1..20: note = chemically synthesized
  source 1..20: mol_type = other DNA
aggggaccacacagacagct

SEQ ID NO: 44840 - DNA, 20 bp, synthetic construct
  misc_feature 1..20: note = chemically synthesized
  source 1..20: mol_type = other DNA
ggggaccacacagacagcta

SEQ ID NO: 44841 - DNA, 20 bp, synthetic construct
  misc_feature 1..20: note = chemically synthesized
  source 1..20: mol_type = other DNA
gggaccacacagacagctag

SEQ ID NO: 44842 - DNA, 20 bp, synthetic construct
  misc_feature 1..20: note = chemically synthesized
  source 1..20: mol_type = other DNA
accacacagacagctagggg

SEQ ID NO: 44843 - DNA, 20 bp, synthetic construct
  misc_feature 1..20: note = chemically synthesized
  source 1..20: mol_type = other DNA
cacacagacagctaggggta

SEQ ID NO: 44844 - DNA, 20 bp, synthetic construct
  misc_feature 1..20: note = chemically synthesized
  source 1..20: mol_type = other DNA
agacagctaggggtagagcc

SEQ ID NO: 44845 - DNA, 20 bp, synthetic construct
  misc_feature 1..20: note = chemically synthesized
  source 1..20: mol_type = other DNA
agagcctggatcaaacccat

SEQ ID NO: 44846 - DNA, 20 bp, synthetic construct
  misc_feature 1..20: note = chemically synthesized
  source 1..20: mol_type = other DNA
aaacccattggtctgcctgc

SEQ ID NO: 44847 - DNA, 20 bp, synthetic construct
  misc_feature 1..20: note = chemically synthesized
  source 1..20: mol_type = other DNA
gccaatgcatctgctgccta

SEQ ID NO: 44848 - DNA, 20 bp, synthetic construct
  misc_feature 1..20: note = chemically synthesized
  source 1..20: mol_type = other DNA
ctgctgcctacggaaacctg

SEQ ID NO: 44849 - DNA, 20 bp, synthetic construct
  misc_feature 1..20: note = chemically synthesized
  source 1..20: mol_type = other DNA
tgctgcctacggaaacctgt

SEQ ID NO: 44850 - DNA, 20 bp, synthetic construct
  misc_feature 1..20: note = chemically synthesized
  source 1..20: mol_type = other DNA
gctgcctacggaaacctgta

SEQ ID NO: 44851 - DNA, 20 bp, synthetic construct
  misc_feature 1..20: note = chemically synthesized
  source 1..20: mol_type = other DNA
ctacggaaacctgtagggac

SEQ ID NO: 44852 - DNA, 20 bp, synthetic construct
  misc_feature 1..20: note = chemically synthesized
  source 1..20: mol_type = other DNA
tacggaaacctgtagggaca

SEQ ID NO: 44853 - DNA, 20 bp, synthetic construct
  misc_feature 1..20: note = chemically synthesized
  source 1..20: mol_type = other DNA
aacctgtagggacaaggccc

SEQ ID NO: 44854 - DNA, 20 bp, synthetic construct
  misc_feature 1..20: note = chemically synthesized
  source 1..20: mol_type = other DNA
acctgtagggacaaggccct

SEQ ID NO: 44855 - DNA, 20 bp, synthetic construct
  misc_feature 1..20: note = chemically synthesized
  source 1..20: mol_type = other DNA
ggacaaggccctgggatgtt

SEQ ID NO: 44856 - DNA, 20 bp, synthetic construct
  misc_feature 1..20: note = chemically synthesized
  source 1..20: mol_type = other DNA
caaggccctgggatgttcag

SEQ ID NO: 44857 - DNA, 20 bp, synthetic construct
  misc_feature 1..20: note = chemically synthesized
  source 1..20: mol_type = other DNA
aggccctgggatgttcagtg

SEQ ID NO: 44858 - DNA, 20 bp, synthetic construct
  misc_feature 1..20: note = chemically synthesized
  source 1..20: mol_type = other DNA
tgggatgttcagtggagcct

SEQ ID NO: 44859 - DNA, 20 bp, synthetic construct
  misc_feature 1..20: note = chemically synthesized
  source 1..20: mol_type = other DNA
gcctgagtcattttataaaa

SEQ ID NO: 44860 - DNA, 20 bp, synthetic construct
  misc_feature 1..20: note = chemically synthesized
  source 1..20: mol_type = other DNA
tttataaaaaagcatgactc

SEQ ID NO: 44861 - DNA, 20 bp, synthetic construct
  misc_feature 1..20: note = chemically synthesized
  source 1..20: mol_type = other DNA
ttataaaaaagcatgactct

SEQ ID NO: 44862 - DNA, 20 bp, synthetic construct
  misc_feature 1..20: note = chemically synthesized
  source 1..20: mol_type = other DNA
tataaaaaagcatgactcta

SEQ ID NO: 44863 - DNA, 20 bp, synthetic construct
  misc_feature 1..20: note = chemically synthesized
  source 1..20: mol_type = other DNA
tagggtccaaaattcctttg

SEQ ID NO: 44864 - DNA, 20 bp, synthetic construct
  misc_feature 1..20: note = chemically synthesized
  source 1..20: mol_type = other DNA
cctttgaagctgttgctatc

SEQ ID NO: 44865 - DNA, 20 bp, synthetic construct
  misc_feature 1..20: note = chemically synthesized
  source 1..20: mol_type = other DNA
tttgaagctgttgctatcca

SEQ ID NO: 44866 - DNA, 20 bp, synthetic construct
  misc_feature 1..20: note = chemically synthesized
  source 1..20: mol_type = other DNA
agctgttgctatccagagtg

SEQ ID NO: 44867 - DNA, 20 bp, synthetic construct
  misc_feature 1..20: note = chemically synthesized
  source 1..20: mol_type = other DNA
ccagagtgaagtcccttctt

SEQ ID NO: 44868 - DNA, 20 bp, synthetic construct
  misc_feature 1..20: note = chemically synthesized
  source 1..20: mol_type = other DNA
cagagtgaagtcccttcttt

SEQ ID NO: 44869 - DNA, 20 bp, synthetic construct
  misc_feature 1..20: note = chemically synthesized
  source 1..20: mol_type = other DNA
gtgaagtcccttctttagga

SEQ ID NO: 44870 - DNA, 20 bp, synthetic construct
  misc_feature 1..20: note = chemically synthesized
  source 1..20: mol_type = other DNA
tgaagtcccttctttaggac

SEQ ID NO: 44871 - DNA, 20 bp, synthetic construct
  misc_feature 1..20: note = chemically synthesized
  source 1..20: mol_type = other DNA
gaagtcccttctttaggaca

SEQ ID NO: 44872 - DNA, 20 bp, synthetic construct
  misc_feature 1..20: note = chemically synthesized
  source 1..20: mol_type = other DNA
gtcccttctttaggacaggg

SEQ ID NO: 44873 - DNA, 20 bp, synthetic construct
  misc_feature 1..20: note = chemically synthesized
  source 1..20: mol_type = other DNA
agggtggccctcctccctcc

SEQ ID NO: 44874 - DNA, 20 bp, synthetic construct
  misc_feature 1..20: note = chemically synthesized
  source 1..20: mol_type = other DNA
cctcctggatgtcacatctt

SEQ ID NO: 44875 - DNA, 20 bp, synthetic construct
  misc_feature 1..20: note = chemically synthesized
  source 1..20: mol_type = other DNA
cctggatgtcacatcttcgg

SEQ ID NO: 44876 - DNA, 20 bp, synthetic construct
  misc_feature 1..20: note = chemically synthesized
  source 1..20: mol_type = other DNA
tggatgtcacatcttcggtg

SEQ ID NO: 44877 - DNA, 20 bp, synthetic construct
  misc_feature 1..20: note = chemically synthesized
  source 1..20: mol_type = other DNA
ggatgtcacatcttcggtgg

SEQ ID NO: 44878 - DNA, 20 bp, synthetic construct
  misc_feature 1..20: note = chemically synthesized
  source 1..20: mol_type = other DNA
gatgtcacatcttcggtgga

SEQ ID NO: 44879 - DNA, 20 bp, synthetic construct
  misc_feature 1..20: note = chemically synthesized
  source 1..20: mol_type = other DNA
atgtcacatcttcggtggag

SEQ ID NO: 44880 - DNA, 20 bp, synthetic construct
  misc_feature 1..20: note = chemically synthesized
  source 1..20: mol_type = other DNA
tcacatcttcggtggagggg

SEQ ID NO: 44881 - DNA, 20 bp, synthetic construct
  misc_feature 1..20: note = chemically synthesized
  source 1..20: mol_type = other DNA
atcttcggtggaggggcaga

SEQ ID NO: 44882 - DNA, 20 bp, synthetic construct
  misc_feature 1..20: note = chemically synthesized
  source 1..20: mol_type = other DNA
tcttcggtggaggggcagaa

SEQ ID NO: 44883 - DNA, 20 bp, synthetic construct
  misc_feature 1..20: note = chemically synthesized
  source 1..20: mol_type = other DNA
cttcggtggaggggcagaaa

SEQ ID NO: 44884 - DNA, 20 bp, synthetic construct
  misc_feature 1..20: note = chemically synthesized
  source 1..20: mol_type = other DNA
ttcggtggaggggcagaaag

SEQ ID NO: 44885 - DNA, 20 bp, synthetic construct
  misc_feature 1..20: note = chemically synthesized
  source 1..20: mol_type = other DNA
tggaggggcagaaaggggac

SEQ ID NO: 44886 - DNA, 20 bp, synthetic construct
  misc_feature 1..20: note = chemically synthesized
  source 1..20: mol_type = other DNA
ggaggggcagaaaggggact

SEQ ID NO: 44887 - DNA, 20 bp, synthetic construct
  misc_feature 1..20: note = chemically synthesized
  source 1..20: mol_type = other DNA
actgggtattctcctcaccc

SEQ ID NO: 44888 - DNA, 20 bp, synthetic construct
  misc_feature 1..20: note = chemically synthesized
  source 1..20: mol_type = other DNA
tattctcctcaccctggccc

SEQ ID NO: 44889 - DNA, 20 bp, synthetic construct
  misc_feature 1..20: note = chemically synthesized
  source 1..20: mol_type = other DNA
tgtgcttctgcaccaccttc

SEQ ID NO: 44890 - DNA, 20 bp, synthetic construct
  misc_feature 1..20: note = chemically synthesized
  source 1..20: mol_type = other DNA
acaaataaaaacgttttttt

SEQ ID NO: 44891 - DNA, 20 bp, synthetic construct
  misc_feature 1..20: note = chemically synthesized
  source 1..20: mol_type = other DNA
aaacgtttttttaagatttg

SEQ ID NO: 44892 - DNA, 20 bp, synthetic construct
  misc_feature 1..20: note = chemically synthesized
  source 1..20: mol_type = other DNA
ttttttaagatttgaagcac

SEQ ID NO: 44893 - DNA, 20 bp, synthetic construct
  misc_feature 1..20: note = chemically synthesized
  source 1..20: mol_type = other DNA
tttttaagatttgaagcact

SEQ ID NO: 44894 - DNA, 20 bp, synthetic construct
  misc_feature 1..20: note = chemically synthesized
  source 1..20: mol_type = other DNA
ttttaagatttgaagcacta

SEQ ID NO: 44895 - DNA, 20 bp, synthetic construct
  misc_feature 1..20: note = chemically synthesized
  source 1..20: mol_type = other DNA
aagatttgaagcactagggc

SEQ ID NO: 44896 - DNA, 20 bp, synthetic construct
  misc_feature 1..20: note = chemically synthesized
  source 1..20: mol_type = other DNA
agatttgaagcactagggcc

SEQ ID NO: 44897 - DNA, 20 bp, synthetic construct
  misc_feature 1..20: note = chemically synthesized
  source 1..20: mol_type = other DNA
gatttgaagcactagggcca

SEQ ID NO: 44898 - DNA, 20 bp, synthetic construct
  misc_feature 1..20: note = chemically synthesized
  source 1..20: mol_type = other DNA
tgaagcactagggccagggt

SEQ ID NO: 44899 - DNA, 20 bp, synthetic construct
  misc_feature 1..20: note = chemically synthesized
  source 1..20: mol_type = other DNA
gaagcactagggccagggtg

SEQ ID NO: 44900 - DNA, 20 bp, synthetic construct
  misc_feature 1..20: note = chemically synthesized
  source 1..20: mol_type = other DNA
agcactagggccagggtgag

SEQ ID NO: 44901 - DNA, 20 bp, synthetic construct
  misc_feature 1..20: note = chemically synthesized
  source 1..20: mol_type = other DNA
gccagggtgaggagaatacc

SEQ ID NO: 44902 - DNA, 20 bp, synthetic construct
  misc_feature 1..20: note = chemically synthesized
  source 1..20: mol_type = other DNA
ccctttctgcccctccaccg

SEQ ID NO: 44903 - DNA, 20 bp, synthetic construct
  misc_feature 1..20: note = chemically synthesized
  source 1..20: mol_type = other DNA
tccaccgaagatgtgacatc

SEQ ID NO: 44904 - DNA, 20 bp, synthetic construct
  misc_feature 1..20: note = chemically synthesized
  source 1..20: mol_type = other DNA
ccaccgaagatgtgacatcc

SEQ ID NO: 44905 - DNA, 20 bp, synthetic construct
  misc_feature 1..20: note = chemically synthesized
  source 1..20: mol_type = other DNA
accgaagatgtgacatccag

SEQ ID NO: 44906 - DNA, 20 bp, synthetic construct
  misc_feature 1..20: note = chemically synthesized
  source 1..20: mol_type = other DNA
ccgaagatgtgacatccagg

SEQ ID NO: 44907 - DNA, 20 bp, synthetic construct
  misc_feature 1..20: note = chemically synthesized
  source 1..20: mol_type = other DNA
cgaagatgtgacatccagga

SEQ ID NO: 44908 - DNA, 20 bp, synthetic construct
  misc_feature 1..20: note = chemically synthesized
  source 1..20: mol_type = other DNA
aagatgtgacatccaggagg

SEQ ID NO: 44909 - DNA, 20 bp, synthetic construct
  misc_feature 1..20: note = chemically synthesized
  source 1..20: mol_type = other DNA
agatgtgacatccaggaggg

SEQ ID NO: 44910 - DNA, 20 bp, synthetic construct
  misc_feature 1..20: note = chemically synthesized
  source 1..20: mol_type = other DNA
atgtgacatccaggagggag

SEQ ID NO: 44911 - DNA, 20 bp, synthetic construct
  misc_feature 1..20: note = chemically synthesized
  source 1..20: mol_type = other DNA
tgtgacatccaggagggagg

SEQ ID NO: 44912 - DNA, 20 bp, synthetic construct
  misc_feature 1..20: note = chemically synthesized
  source 1..20: mol_type = other DNA
gtgacatccaggagggagga

SEQ ID NO: 44913 - DNA, 20 bp, synthetic construct
  misc_feature 1..20: note = chemically synthesized
  source 1..20: mol_type = other DNA
aggagggccaccctgtccta

SEQ ID NO: 44914 - DNA, 20 bp, synthetic construct
  misc_feature 1..20: note = chemically synthesized
  source 1..20: mol_type = other DNA
agggccaccctgtcctaaag

SEQ ID NO: 44915 - DNA, 20 bp, synthetic construct
  misc_feature 1..20: note = chemically synthesized
  source 1..20: mol_type = other DNA
gggccaccctgtcctaaaga

SEQ ID NO: 44916 - DNA, 20 bp, synthetic construct
  misc_feature 1..20: note = chemically synthesized
  source 1..20: mol_type = other DNA
ggccaccctgtcctaaagaa

SEQ ID NO: 44917 - DNA, 20 bp, synthetic construct
  misc_feature 1..20: note = chemically synthesized
  source 1..20: mol_type = other DNA
ctaaagaagggacttcactc

SEQ ID NO: 44918 - DNA, 20 bp, synthetic construct
  misc_feature 1..20: note = chemically synthesized
  source 1..20: mol_type = other DNA
agaagggacttcactctgga

SEQ ID NO: 44919 - DNA, 20 bp, synthetic construct
  misc_feature 1..20: note = chemically synthesized
  source 1..20: mol_type = other DNA
gacttcactctggatagcaa

SEQ ID NO: 44920 - DNA, 20 bp, synthetic construct
  misc_feature 1..20: note = chemically synthesized
  source 1..20: mol_type = other DNA
tctggatagcaacagcttca

SEQ ID NO: 44921 - DNA, 20 bp, synthetic construct
  misc_feature 1..20: note = chemically synthesized
  source 1..20: mol_type = other DNA
ctggatagcaacagcttcaa

SEQ ID NO: 44922 - DNA, 20 bp, synthetic construct
  misc_feature 1..20: note = chemically synthesized
  source 1..20: mol_type = other DNA
caacagcttcaaaggaattt

SEQ ID NO: 44923 - DNA, 20 bp, synthetic construct
  misc_feature 1..20: note = chemically synthesized
  source 1..20: mol_type = other DNA
ttcaaaggaattttggaccc

SEQ ID NO: 44924 - DNA, 20 bp, synthetic construct
  misc_feature 1..20: note = chemically synthesized
  source 1..20: mol_type = other DNA
caaaggaattttggacccta

SEQ ID NO: 44925 - DNA, 20 bp, synthetic construct
  misc_feature 1..20: note = chemically synthesized
  source 1..20: mol_type = other DNA
tgcttttttataaaatgact

SEQ ID NO: 44926 - DNA, 20 bp, synthetic construct
  misc_feature 1..20: note = chemically synthesized
  source 1..20: mol_type = other DNA
gcttttttataaaatgactc

SEQ ID NO: 44927 - DNA, 20 bp, synthetic construct
  misc_feature 1..20: note = chemically synthesized
  source 1..20: mol_type = other DNA
tcaggctccactgaacatcc

SEQ ID NO: 44928 - DNA, 20 bp, synthetic construct
  misc_feature 1..20: note = chemically synthesized
  source 1..20: mol_type = other DNA
caggctccactgaacatccc

SEQ ID NO: 44929 - DNA, 20 bp, synthetic construct
  misc_feature 1..20: note = chemically synthesized
  source 1..20: mol_type = other DNA
aggctccactgaacatccca

SEQ ID NO: 44930 - DNA, 20 bp, synthetic construct
  misc_feature 1..20: note = chemically synthesized
  source 1..20: mol_type = other DNA
atcccagggccttgtcccta

SEQ ID NO: 44931 - DNA, 20 bp, synthetic construct
  misc_feature 1..20: note = chemically synthesized
  source 1..20: mol_type = other DNA
tcccagggccttgtccctac

SEQ ID NO: 44932 - DNA, 20 bp, synthetic construct
  misc_feature 1..20: note = chemically synthesized
  source 1..20: mol_type = other DNA
cttgtccctacaggtttccg

SEQ ID NO: 44933 - DNA, 20 bp, synthetic construct
  misc_feature 1..20: note = chemically synthesized
  source 1..20: mol_type = other DNA
ttgtccctacaggtttccgt

SEQ ID NO: 44934 - DNA, 20 bp, synthetic construct
  misc_feature 1..20: note = chemically synthesized
  source 1..20: mol_type = other DNA
tccctacaggtttccgtagg

SEQ ID NO: 44935 - DNA, 20 bp, synthetic construct
  misc_feature 1..20: note = chemically synthesized
  source 1..20: mol_type = other DNA
ctacaggtttccgtaggcag

SEQ ID NO: 44936 - DNA, 20 bp, synthetic construct
  misc_feature 1..20: note = chemically synthesized
  source 1..20: mol_type = other DNA
tccgtaggcagcagatgcat

SEQ ID NO: 44937 - DNA, 20 bp, synthetic construct
  misc_feature 1..20: note = chemically synthesized
  source 1..20: mol_type = other DNA
ggcagcagatgcattggcac

SEQ ID NO: 44938 - DNA, 20 bp, synthetic construct
  misc_feature 1..20: note = chemically synthesized
  source 1..20: mol_type = other DNA
cagatgcattggcacaagaa

SEQ ID NO: 44939 - DNA, 20 bp, synthetic construct
  misc_feature 1..20: note = chemically synthesized
  source 1..20: mol_type = other DNA
tgcattggcacaagaatggc

SEQ ID NO: 44940 - DNA, 20 bp, synthetic construct
  misc_feature 1..20: note = chemically synthesized
  source 1..20: mol_type = other DNA
attggcacaagaatggctgg

SEQ ID NO: 44941 - DNA, 20 bp, synthetic construct
  misc_feature 1..20: note = chemically synthesized
  source 1..20: mol_type = other DNA
ttggcacaagaatggctggc

SEQ ID NO: 44942 - DNA, 20 bp, synthetic construct
  misc_feature 1..20: note = chemically synthesized
  source 1..20: mol_type = other DNA
gcacaagaatggctggcagg

SEQ ID NO: 44943 - DNA, 20 bp, synthetic construct
  misc_feature 1..20: note = chemically synthesized
  source 1..20: mol_type = other DNA
atggctggcaggcagaccaa

SEQ ID NO: 44944 - DNA, 20 bp, synthetic construct
  misc_feature 1..20: note = chemically synthesized
  source 1..20: mol_type = other DNA
tggctggcaggcagaccaat

SEQ ID NO: 44945 - DNA, 20 bp, synthetic construct
  misc_feature 1..20: note = chemically synthesized
  source 1..20: mol_type = other DNA
gcagaccaatgggtttgatc

SEQ ID NO: 44946 - DNA, 20 bp, synthetic construct
  misc_feature 1..20: note = chemically synthesized
  source 1..20: mol_type = other DNA
cagaccaatgggtttgatcc

SEQ ID NO: 44947 - DNA, 20 bp, synthetic construct
  misc_feature 1..20: note = chemically synthesized
  source 1..20: mol_type = other DNA
tttgatccaggctctacccc

SEQ ID NO: 44948 - DNA, 20 bp, synthetic construct
  misc_feature 1..20: note = chemically synthesized
  source 1..20: mol_type = other DNA
tctacccctagctgtctgtg

SEQ ID NO: 44949 - DNA, 20 bp, synthetic construct
  misc_feature 1..20: note = chemically synthesized
  source 1..20: mol_type = other DNA
gtgtggtcccctctgaactt

SEQ ID NO: 44950 - DNA, 20 bp, synthetic construct
  misc_feature 1..20: note = chemically synthesized
  source 1..20: mol_type = other DNA
gtctcctcgtctttcaaatg

SEQ ID NO: 44951 - DNA, 20 bp, synthetic construct
  misc_feature 1..20: note = chemically synthesized
  source 1..20: mol_type = other DNA
cctcgtctttcaaatgaaga

SEQ ID NO: 44952 - DNA, 20 bp, synthetic construct
  misc_feature 1..20: note = chemically synthesized
  source 1..20: mol_type = other DNA
aatgaagatagacgtaccac

SEQ ID NO: 44953 - DNA, 20 bp, synthetic construct
  misc_feature 1..20: note = chemically synthesized
  source 1..20: mol_type = other DNA
atgaagatagacgtaccact

SEQ ID NO: 44954 - DNA, 20 bp, synthetic construct
  misc_feature 1..20: note = chemically synthesized
  source 1..20: mol_type = other DNA
tgaagatagacgtaccactg

SEQ ID NO: 44955 - DNA, 20 bp, synthetic construct
  misc_feature 1..20: note = chemically synthesized
  source 1..20: mol_type = other DNA
atagacgtaccactggggca

SEQ ID NO: 44956 - DNA, 20 bp, synthetic construct
  misc_feature 1..20: note = chemically synthesized
  source 1..20: mol_type = other DNA
acgtaccactggggcatggc

SEQ ID NO: 44957 - DNA, 20 bp, synthetic construct
  misc_feature 1..20: note = chemically synthesized
  source 1..20: mol_type = other DNA
cgtaccactggggcatggcc

SEQ ID NO: 44958 - DNA, 20 bp, synthetic construct
  misc_feature 1..20: note = chemically synthesized
  source 1..20: mol_type = other DNA
ctggggcatggccaggctta

SEQ ID NO: 44959 - DNA, 20 bp, synthetic construct
  misc_feature 1..20: note = chemically synthesized
  source 1..20: mol_type = other DNA
tggggcatggccaggcttaa

SEQ ID NO: 44960 - DNA, 20 bp, synthetic construct
  misc_feature 1..20: note = chemically synthesized
  source 1..20: mol_type = other DNA
ggggcatggccaggcttaaa

SEQ ID NO: 44961 - DNA, 20 bp, synthetic construct
  misc_feature 1..20: note = chemically synthesized
  source 1..20: mol_type = other DNA
ggcttaaagggaattctata

SEQ ID NO: 44962 - DNA, 20 bp, synthetic construct
  misc_feature 1..20: note = chemically synthesized
  source 1..20: mol_type = other DNA
taaagggaattctatacaga

SEQ ID NO: 44963 - DNA, 20 bp, synthetic construct
  misc_feature 1..20: note = chemically synthesized
  source 1..20: mol_type = other DNA
gggaattctatacagaaagc

SEQ ID NO: 44964 - DNA, 20 bp, synthetic construct
  misc_feature 1..20: note = chemically synthesized
  source 1..20: mol_type = other DNA
aattctatacagaaagccag

SEQ ID NO: 44965 - DNA, 20 bp, synthetic construct
  misc_feature 1..20: note = chemically synthesized
  source 1..20: mol_type = other DNA
aagccagtagttactgtgct

SEQ ID NO: 44966 - DNA, 20 bp, synthetic construct
  misc_feature 1..20: note = chemically synthesized
  source 1..20: mol_type = other DNA
tactgtgcttggtacccgat

SEQ ID NO: 44967 - DNA, 20 bp, synthetic construct
  misc_feature 1..20: note = chemically synthesized
  source 1..20: mol_type = other DNA
tgctgtccccttctgatttt

SEQ ID NO: 44968 - DNA, 20 bp, synthetic construct
  misc_feature 1..20: note = chemically synthesized
  source 1..20: mol_type = other DNA
ccccttctgattttcagcaa

SEQ ID NO: 44969 - DNA, 20 bp, synthetic construct
  misc_feature 1..20: note = chemically synthesized
  source 1..20: mol_type = other DNA
cccttctgattttcagcaat

SEQ ID NO: 44970 - DNA, 20 bp, synthetic construct
  misc_feature 1..20: note = chemically synthesized
  source 1..20: mol_type = other DNA
ttttcagcaatgggcctact

SEQ ID NO: 44971 - DNA, 20 bp, synthetic construct
  misc_feature 1..20: note = chemically synthesized
  source 1..20: mol_type = other DNA
agcaatgggcctactaagca

SEQ ID NO: 44972 - DNA, 20 bp, synthetic construct
  misc_feature 1..20: note = chemically synthesized
  source 1..20: mol_type = other DNA
ggcctactaagcacagtccc

SEQ ID NO: 44973 - DNA, 20 bp, synthetic construct
  misc_feature 1..20: note = chemically synthesized
  source 1..20: mol_type = other DNA
cacagtccccagtgtatatg

SEQ ID NO: 44974 - DNA, 20 bp, synthetic construct
  misc_feature 1..20: note = chemically synthesized
  source 1..20: mol_type = other DNA
agtccccagtgtatatgcag

SEQ ID NO: 44975 - DNA, 20 bp, synthetic construct
  misc_feature 1..20: note = chemically synthesized
  source 1..20: mol_type = other DNA
ccagtgtatatgcagtggcc

SEQ ID NO: 44976 - DNA, 20 bp, synthetic construct
  misc_feature 1..20: note = chemically synthesized
  source 1..20: mol_type = other DNA
atgcagtggcccagccctat

SEQ ID NO: 44977 - DNA, 20 bp, synthetic construct
  misc_feature 1..20: note = chemically synthesized
  source 1..20: mol_type = other DNA
tgcagtggcccagccctatc

SEQ ID NO: 44978 - DNA, 20 bp, synthetic construct
  misc_feature 1..20: note = chemically synthesized
  source 1..20: mol_type = other DNA
agtggcccagccctatcagg

SEQ ID NO: 44979 - DNA, 20 bp, synthetic construct
  misc_feature 1..20: note = chemically synthesized
  source 1..20: mol_type = other DNA
caggaagtgccattcccaaa

SEQ ID NO: 44980 - DNA, 20 bp, synthetic construct
  misc_feature 1..20: note = chemically synthesized
  source 1..20: mol_type = other DNA
aggaagtgccattcccaaaa

SEQ ID NO: 44981 - DNA, 20 bp, synthetic construct
  misc_feature 1..20: note = chemically synthesized
  source 1..20: mol_type = other DNA
ggaagtgccattcccaaaaa

SEQ ID NO: 44982 - DNA, 20 bp, synthetic construct
  misc_feature 1..20: note = chemically synthesized
  source 1..20: mol_type = other DNA
agtgccattcccaaaaaggg

SEQ ID NO: 44983 - DNA, 20 bp, synthetic construct
  misc_feature 1..20: note = chemically synthesized
  source 1..20: mol_type = other DNA
tcccaaaaagggtggctcac

SEQ ID NO: 44984 - DNA, 20 bp, synthetic construct
  misc_feature 1..20: note = chemically synthesized
  source 1..20: mol_type = other DNA
aaagggtggctcaccagctc

SEQ ID NO: 44985 - DNA, 20 bp, synthetic construct
  misc_feature 1..20: note = chemically synthesized
  source 1..20: mol_type = other DNA
gggtggctcaccagctccag

SEQ ID NO: 44986 - DNA, 20 bp, synthetic construct
  misc_feature 1..20: note = chemically synthesized
  source 1..20: mol_type = other DNA
ggtggctcaccagctccagc

SEQ ID NO: 44987 - DNA, 20 bp, synthetic construct
  misc_feature 1..20: note = chemically synthesized
  source 1..20: mol_type = other DNA
aggtcgccactcatcttcac

SEQ ID NO: 44988 - DNA, 20 bp, synthetic construct
  misc_feature 1..20: note = chemically synthesized
  source 1..20: mol_type = other DNA
ggtcgccactcatcttcacc

SEQ ID NO: 44989 - DNA, 20 bp, synthetic construct
  misc_feature 1..20: note = chemically synthesized
  source 1..20: mol_type = other DNA
cgccactcatcttcaccagg

SEQ ID NO: 44990 - DNA, 20 bp, synthetic construct
  misc_feature 1..20: note = chemically synthesized
  source 1..20: mol_type = other DNA
actcatcttcaccaggaagc

SEQ ID NO: 44991 - DNA, 20 bp, synthetic construct
  misc_feature 1..20: note = chemically synthesized
  source 1..20: mol_type = other DNA
ctcatcttcaccaggaagcc

SEQ ID NO: 44992 - DNA, 20 bp, synthetic construct
  misc_feature 1..20: note = chemically synthesized
  source 1..20: mol_type = other DNA
atcttcaccaggaagccagg

SEQ ID NO: 44993 - DNA, 20 bp, synthetic construct
  misc_feature 1..20: note = chemically synthesized
  source 1..20: mol_type = other DNA
ttcaccaggaagccaggaag

SEQ ID NO: 44994 - DNA, 20 bp, synthetic construct
  misc_feature 1..20: note = chemically synthesized
  source 1..20: mol_type = other DNA
tcaccaggaagccaggaaga

SEQ ID NO: 44995 - DNA, 20 bp, synthetic construct
  misc_feature 1..20: note = chemically synthesized
  source 1..20: mol_type = other DNA
ggaagccaggaagaaggcca

SEQ ID NO: 44996 - DNA, 20 bp, synthetic construct
  misc_feature 1..20: note = chemically synthesized
  source 1..20: mol_type = other DNA
agccaggaagaaggccatgg

SEQ ID NO: 44997 - DNA, 20 bp, synthetic construct
  misc_feature 1..20: note = chemically synthesized
  source 1..20: mol_type = other DNA
agaaggccatggaagacatg

SEQ ID NO: 44998 - DNA, 20 bp, synthetic construct
  misc_feature 1..20: note = chemically synthesized
  source 1..20: mol_type = other DNA
gaaggccatggaagacatgc

SEQ ID NO: 44999 - DNA, 20 bp, synthetic construct
  misc_feature 1..20: note = chemically synthesized
  source 1..20: mol_type = other DNA
atggaagacatgcaggatct

SEQ ID NO: 45000 - DNA, 20 bp, synthetic construct
  misc_feature 1..20: note = chemically synthesized
  source 1..20: mol_type = other DNA
aagacatgcaggatcttggt

SEQ ID NO: 45001 - DNA, 20 bp, synthetic construct
  misc_feature 1..20: note = chemically synthesized
  source 1..20: mol_type = other DNA
agacatgcaggatcttggtg

SEQ ID NO: 45002 - DNA, 20 bp, synthetic construct
  misc_feature 1..20: note = chemically synthesized
  source 1..20: mol_type = other DNA
ggatcttggtgaggtatccc

SEQ ID NO: 45003 - DNA, 20 bp, synthetic construct
  misc_feature 1..20: note = chemically synthesized
  source 1..20: mol_type = other DNA
tcttggtgaggtatccccgg

SEQ ID NO: 45004 - DNA, 20 bp, synthetic construct
  misc_feature 1..20: note = chemically synthesized
  source 1..20: mol_type = other DNA
cttggtgaggtatccccggc

SEQ ID NO: 45005 - DNA, 20 bp, synthetic construct
  misc_feature 1..20: note = chemically synthesized
  source 1..20: mol_type = other DNA
ggtgaggtatccccggcggg

SEQ ID NO: 45006 - DNA, 20 bp, synthetic construct
  misc_feature 1..20: note = chemically synthesized
  source 1..20: mol_type = other DNA
ggtatccccggcgggcagcc

SEQ ID NO: 45007 - DNA, 20 bp, synthetic construct
  misc_feature 1..20: note = chemically synthesized
  source 1..20: mol_type = other DNA
gtatccccggcgggcagcct

SEQ ID NO: 45008 - DNA, 20 bp, synthetic construct
  misc_feature 1..20: note = chemically synthesized
  source 1..20: mol_type = other DNA
cggcgggcagcctgggcctg

SEQ ID NO: 45009 - DNA, 20 bp, synthetic construct
  misc_feature 1..20: note = chemically synthesized
  source 1..20: mol_type = other DNA
ggcgggcagcctgggcctgc

SEQ ID NO: 45010 - DNA, 20 bp, synthetic construct
  misc_feature 1..20: note = chemically synthesized
  source 1..20: mol_type = other DNA
gggcagcctgggcctgcagg

SEQ ID NO: 45011 - DNA, 20 bp, synthetic construct
  misc_feature 1..20: note = chemically synthesized
  source 1..20: mol_type = other DNA
cagcctgggcctgcaggcgg

SEQ ID NO: 45012 - DNA, 20 bp, synthetic construct
  misc_feature 1..20: note = chemically synthesized
  source 1..20: mol_type = other DNA
agcctgggcctgcaggcggc

SEQ ID NO: 45013 - DNA, 20 bp, synthetic construct
  misc_feature 1..20: note = chemically synthesized
  source 1..20: mol_type = other DNA
ctgggcctgcaggcggcggg

SEQ ID NO: 45014 - DNA, 20 bp, synthetic construct
  misc_feature 1..20: note = chemically synthesized
  source 1..20: mol_type = other DNA
gggcagtgcgctctgactgc

SEQ ID NO: 45015 - DNA, 20 bp, synthetic construct
  misc_feature 1..20: note = chemically synthesized
  source 1..20: mol_type = other DNA
gcagtgcgctctgactgcga

SEQ ID NO: 45016 - DNA, 20 bp, synthetic construct
  misc_feature 1..20: note = chemically synthesized
  source 1..20: mol_type = other DNA
cagtgcgctctgactgcgag

SEQ ID NO: 45017 - DNA, 20 bp, synthetic construct
  misc_feature 1..20: note = chemically synthesized
  source 1..20: mol_type = other DNA
tgcgctctgactgcgagagg

SEQ ID NO: 45018 - DNA, 20 bp, synthetic construct
  misc_feature 1..20: note = chemically synthesized
  source 1..20: mol_type = other DNA
gcgctctgactgcgagaggt

SEQ ID NO: 45019 - DNA, 20 bp, synthetic construct
  misc_feature 1..20: note = chemically synthesized
  source 1..20: mol_type = other DNA
gagaggtgggtctcctcctt

SEQ ID NO: 45020 - DNA, 20 bp, synthetic construct
  misc_feature 1..20: note = chemically synthesized
  source 1..20: mol_type = other DNA
cctccttcagcaccaccacg

SEQ ID NO: 45021 - DNA, 20 bp, synthetic construct
  misc_feature 1..20: note = chemically synthesized
  source 1..20: mol_type = other DNA
ctccttcagcaccaccacgt

SEQ ID NO: 45022 - DNA, 20 bp, synthetic construct
  misc_feature 1..20: note = chemically synthesized
  source 1..20: mol_type = other DNA
cagcaccaccacgtaggtgc

SEQ ID NO: 45023 - DNA, 20 bp, synthetic construct
  misc_feature 1..20: note = chemically synthesized
  source 1..20: mol_type = other DNA
agcaccaccacgtaggtgcc

SEQ ID NO: 45024 - DNA, 20 bp, synthetic construct
  misc_feature 1..20: note = chemically synthesized
  source 1..20: mol_type = other DNA
taggtgccaggcaacctcca

SEQ ID NO: 45025 - DNA, 20 bp, synthetic construct
  misc_feature 1..20: note = chemically synthesized
  source 1..20: mol_type = other DNA
caggcaacctccacggatcc

SEQ ID NO: 45026 - DNA, 20 bp, synthetic construct
  misc_feature 1..20: note = chemically synthesized
  source 1..20: mol_type = other DNA
cacggatcctggccccatgc

SEQ ID NO: 45027 - DNA, 20 bp, synthetic construct
  misc_feature 1..20: note = chemically synthesized
  source 1..20: mol_type = other DNA
acggatcctggccccatgca

SEQ ID NO: 45028 - DNA, 20 bp, synthetic construct
  misc_feature 1..20: note = chemically synthesized
  source 1..20: mol_type = other DNA
ggatcctggccccatgcaag

SEQ ID NO: 45029 - DNA, 20 bp, synthetic construct
  misc_feature 1..20: note = chemically synthesized
  source 1..20: mol_type = other DNA
gatcctggccccatgcaagg

SEQ ID NO: 45030 - DNA, 20 bp, synthetic construct
  misc_feature 1..20: note = chemically synthesized
  source 1..20: mol_type = other DNA
caaggaggaacatgatgaca

SEQ ID NO: 45031 - DNA, 20 bp, synthetic construct
  misc_feature 1..20: note = chemically synthesized
  source 1..20: mol_type = other DNA
ggaggaacatgatgacatgg

SEQ ID NO: 45032 - DNA, 20 bp, synthetic construct
  misc_feature 1..20: note = chemically synthesized
  source 1..20: mol_type = other DNA
atgatgacatggaagaaacc

SEQ ID NO: 45033 - DNA, 20 bp, synthetic construct
  misc_feature 1..20: note = chemically synthesized
  source 1..20: mol_type = other DNA
ggaagaaacccagcaaaccc

SEQ ID NO: 45034 - DNA, 20 bp, synthetic construct
  misc_feature 1..20: note = chemically synthesized
  source 1..20: mol_type = other DNA
gaagaaacccagcaaaccct

SEQ ID NO: 45035 - DNA, 20 bp, synthetic construct
  misc_feature 1..20: note = chemically synthesized
  source 1..20: mol_type = other DNA
ctacttacaaattacaacaa

SEQ ID NO: 45036 - DNA, 20 bp, synthetic construct
  misc_feature 1..20: note = chemically synthesized
  source 1..20: mol_type = other DNA
acttacaaattacaacaaaa

SEQ ID NO: 45037 - DNA, 20 bp, synthetic construct
  misc_feature 1..20: note = chemically synthesized
  source 1..20: mol_type = other DNA
ttacaacaaaagagacacaa

SEQ ID NO: 45038 - DNA, 20 bp, synthetic construct
  misc_feature 1..20: note = chemically synthesized
  source 1..20: mol_type = other DNA
acaacaaaagagacacaaca

SEQ ID NO: 45039 - DNA, 20 bp, synthetic construct
  misc_feature 1..20: note = chemically synthesized
  source 1..20: mol_type = other DNA
aaaagagacacaacagagta

SEQ ID NO: 45040 - DNA, 20 bp, synthetic construct
  misc_feature 1..20: note = chemically synthesized
  source 1..20: mol_type = other DNA
agagacacaacagagtatag

SEQ ID NO: 45041 - DNA, 20 bp, synthetic construct
  misc_feature 1..20: note = chemically synthesized
  source 1..20: mol_type = other DNA
acagagtatagtagatgata

SEQ ID NO: 45042 - DNA, 20 bp, synthetic construct
  misc_feature 1..20: note = chemically synthesized
  source 1..20: mol_type = other DNA
gagtatagtagatgataaag

SEQ ID NO: 45043 - DNA, 20 bp, synthetic construct
  misc_feature 1..20: note = chemically synthesized
  source 1..20: mol_type = other DNA
gataaagaagttaccaaatg

SEQ ID NO: 45044 - DNA, 20 bp, synthetic construct
  misc_feature 1..20: note = chemically synthesized
  source 1..20: mol_type = other DNA
gttaccaaatgcggaccaaa

SEQ ID NO: 45045 - DNA, 20 bp, synthetic construct
  misc_feature 1..20: note = chemically synthesized
  source 1..20: mol_type = other DNA
gcggaccaaaaagcaaatta

SEQ ID NO: 45046 - DNA, 20 bp, synthetic construct
  misc_feature 1..20: note = chemically synthesized
  source 1..20: mol_type = other DNA
agcaaattaaagaactcata

SEQ ID NO: 45047 - DNA, 20 bp, synthetic construct
  misc_feature 1..20: note = chemically synthesized
  source 1..20: mol_type = other DNA
gcaaattaaagaactcatat

SEQ ID NO: 45048 - DNA, 20 bp, synthetic construct
  misc_feature 1..20: note = chemically synthesized
  source 1..20: mol_type = other DNA
gccaactattattattcaca

SEQ ID NO: 45049 - DNA, 20 bp, synthetic construct
  misc_feature 1..20: note = chemically synthesized
  source 1..20: mol_type = other DNA
acactttcaaatgtgccatt

SEQ ID NO: 45050 - DNA, 20 bp, synthetic construct
  misc_feature 1..20: note = chemically synthesized
  source 1..20: mol_type = other DNA
cactttcaaatgtgccattc

SEQ ID NO: 45051 - DNA, 20 bp, synthetic construct
  misc_feature 1..20: note = chemically synthesized
  source 1..20: mol_type = other DNA
atgtgccattcaggcaaaaa

SEQ ID NO: 45052 - DNA, 20 bp, synthetic construct
  misc_feature 1..20: note = chemically synthesized
  source 1..20: mol_type = other DNA
tgtgccattcaggcaaaaat

SEQ ID NO: 45053 - DNA, 20 bp, synthetic construct
  misc_feature 1..20: note = chemically synthesized
  source 1..20: mol_type = other DNA
tcaggcaaaaatgggaacta

SEQ ID NO: 45054 - DNA, 20 bp, synthetic construct
  misc_feature 1..20: note = chemically synthesized
  source 1..20: mol_type = other DNA
caggcaaaaatgggaactac

SEQ ID NO: 45055 - DNA, 20 bp, synthetic construct
  misc_feature 1..20: note = chemically synthesized
  source 1..20: mol_type = other DNA
ctacgggccacactcgacaa

SEQ ID NO: 45056 - DNA, 20 bp, synthetic construct
  misc_feature 1..20: note = chemically synthesized
  source 1..20: mol_type = other DNA
tacgggccacactcgacaac

SEQ ID NO: 45057 - DNA, 20 bp, synthetic construct
  misc_feature 1..20: note = chemically synthesized
  source 1..20: mol_type = other DNA
ttttcctctgtacctgcacc

SEQ ID NO: 45058 - DNA, 20 bp, synthetic construct
  misc_feature 1..20: note = chemically synthesized
  source 1..20: mol_type = other DNA
tacctgcacccagctctcta

SEQ ID NO: 45059 - DNA, 20 bp, synthetic construct
  misc_feature 1..20: note = chemically synthesized
  source 1..20: mol_type = other DNA
acctgcacccagctctctac

SEQ ID NO: 45060 - DNA, 20 bp, synthetic construct
  misc_feature 1..20: note = chemically synthesized
  source 1..20: mol_type = other DNA
cacccagctctctacgggcc

SEQ ID NO: 45061 - DNA, 20 bp, synthetic construct
  misc_feature 1..20: note = chemically synthesized
  source 1..20: mol_type = other DNA
tctacgggcctggtcgctcc

SEQ ID NO: 45062 - DNA, 20 bp, synthetic construct
  misc_feature 1..20: note = chemically synthesized
  source 1..20: mol_type = other DNA
acgggcctggtcgctcctgg

SEQ ID NO: 45063 - DNA, 20 bp, synthetic construct
  misc_feature 1..20: note = chemically synthesized
  source 1..20: mol_type = other DNA
gctcctggtggccctgccca

SEQ ID NO: 45064 - DNA, 20 bp, synthetic construct
  misc_feature 1..20: note = chemically synthesized
  source 1..20: mol_type = other DNA
ctcctggtggccctgcccaa

SEQ ID NO: 45065 - DNA, 20 bp, synthetic construct
  misc_feature 1..20: note = chemically synthesized
  source 1..20: mol_type = other DNA
ccaccccctcccccatgccc

SEQ ID NO: 45066 - DNA, 20 bp, synthetic construct
  misc_feature 1..20: note = chemically synthesized
  source 1..20: mol_type = other DNA
cccctcccccatgccccagt

SEQ ID NO: 45067 - DNA, 20 bp, synthetic construct
  misc_feature 1..20: note = chemically synthesized
  source 1..20: mol_type = other DNA
tgccccagtcagaataaatt

SEQ ID NO: 45068 - DNA, 20 bp, synthetic construct
  misc_feature 1..20: note = chemically synthesized
  source 1..20: mol_type = other DNA
gccccagtcagaataaattg

SEQ ID NO: 45069 - DNA, 20 bp, synthetic construct
  misc_feature 1..20: note = chemically synthesized
  source 1..20: mol_type = other DNA
ccccagtcagaataaattga

SEQ ID NO: 45070 - DNA, 20 bp, synthetic construct
  misc_feature 1..20: note = chemically synthesized
  source 1..20: mol_type = other DNA
taaattgagggaaaaaatca

SEQ ID NO: 45071 - DNA, 20 bp, synthetic construct
  misc_feature 1..20: note = chemically synthesized
  source 1..20: mol_type = other DNA
aaattgagggaaaaaatcat

SEQ ID NO: 45072 - DNA, 20 bp, synthetic construct
  misc_feature 1..20: note = chemically synthesized
  source 1..20: mol_type = other DNA
agggaaaaaatcatgggctt

SEQ ID NO: 45073 - DNA, 20 bp, synthetic construct
  misc_feature 1..20: note = chemically synthesized
  source 1..20: mol_type = other DNA
ggaaaaaatcatgggctttg

SEQ ID NO: 45074 - DNA, 20 bp, synthetic construct
  misc_feature 1..20: note = chemically synthesized
  source 1..20: mol_type = other DNA
aaaatcatgggctttggagc

SEQ ID NO: 45075 - DNA, 20 bp, synthetic construct
  misc_feature 1..20: note = chemically synthesized
  source 1..20: mol_type = other DNA
aaatcatgggctttggagcc

SEQ ID NO: 45076 - DNA, 20 bp, synthetic construct
  misc_feature 1..20: note = chemically synthesized
  source 1..20: mol_type = other DNA
gctttggagccaggaaaccg

SEQ ID NO: 45077 - DNA, 20 bp, synthetic construct
  misc_feature 1..20: note = chemically synthesized
  source 1..20: mol_type = other DNA
gaaaccgtggacctgaattc

SEQ ID NO: 45078 - DNA, 20 bp, synthetic construct
  misc_feature 1..20: note = chemically synthesized
  source 1..20: mol_type = other DNA
attccagctccaatatttac

SEQ ID NO: 45079 - DNA, 20 bp, synthetic construct
  misc_feature 1..20: note = chemically synthesized
  source 1..20: mol_type = other DNA
tccaatatttactggttgtg

SEQ ID NO: 45080 - DNA, 20 bp, synthetic construct
  misc_feature 1..20: note = chemically synthesized
  source 1..20: mol_type = other DNA
tttactggttgtgcagccat

SEQ ID NO: 45081 - DNA, 20 bp, synthetic construct
  misc_feature 1..20: note = chemically synthesized
  source 1..20: mol_type = other DNA
ctggttgtgcagccatgagc

SEQ ID NO: 45082 - DNA, 20 bp, synthetic construct
  misc_feature 1..20: note = chemically synthesized
  source 1..20: mol_type = other DNA
gagcaagtcactcaacctct

SEQ ID NO: 45083 - DNA, 20 bp, synthetic construct
  misc_feature 1..20: note = chemically synthesized
  source 1..20: mol_type = other DNA
gcaagtcactcaacctctcg

SEQ ID NO: 45084 - DNA, 20 bp, synthetic construct
  misc_feature 1..20: note = chemically synthesized
  source 1..20: mol_type = other DNA
cactcaacctctcggagcct

SEQ ID NO: 45085 - DNA, 20 bp, synthetic construct
  misc_feature 1..20: note = chemically synthesized
  source 1..20: mol_type = other DNA
cagatacctctgctgtattg

SEQ ID NO: 45086 - DNA, 20 bp, synthetic construct
  misc_feature 1..20: note = chemically synthesized
  source 1..20: mol_type = other DNA
gatacctctgctgtattgta

SEQ ID NO: 45087 - DNA, 20 bp, synthetic construct
  misc_feature 1..20: note = chemically synthesized
  source 1..20: mol_type = other DNA
ctgctgtattgtagagacca

SEQ ID NO: 45088 - DNA, 20 bp, synthetic construct
  misc_feature 1..20: note = chemically synthesized
  source 1..20: mol_type = other DNA
agaccacagtacctatgaca

SEQ ID NO: 45089 - DNA, 20 bp, synthetic construct
  misc_feature 1..20: note = chemically synthesized
  source 1..20: mol_type = other DNA
gaccacagtacctatgacat

SEQ ID NO: 45090 - DNA, 20 bp, synthetic construct
  misc_feature 1..20: note = chemically synthesized
  source 1..20: mol_type = other DNA
tacctatgacataggcctgc

SEQ ID NO: 45091 - DNA, 20 bp, synthetic construct
  misc_feature 1..20: note = chemically synthesized
  source 1..20: mol_type = other DNA
acctatgacataggcctgct

SEQ ID NO: 45092 - DNA, 20 bp, synthetic construct
  misc_feature 1..20: note = chemically synthesized
  source 1..20: mol_type = other DNA
atgacataggcctgctggga

SEQ ID NO: 45093 - DNA, 20 bp, synthetic construct
  misc_feature 1..20: note = chemically synthesized
  source 1..20: mol_type = other DNA
ataggcctgctgggaaagtc

SEQ ID NO: 45094 - DNA, 20 bp, synthetic construct
  misc_feature 1..20: note = chemically synthesized
  source 1..20: mol_type = other DNA
aggcctgctgggaaagtcaa

SEQ ID NO: 45095 - DNA, 20 bp, synthetic construct
  misc_feature 1..20: note = chemically synthesized
  source 1..20: mol_type = other DNA
gctgggaaagtcaagagtga

SEQ ID NO: 45096 - DNA, 20 bp, synthetic construct
  misc_feature 1..20: note = chemically synthesized
  source 1..20: mol_type = other DNA
ggttatataaatctcccatc

SEQ ID NO: 45097 - DNA, 20 bp, synthetic construct
  misc_feature 1..20: note = chemically synthesized
  source 1..20: mol_type = other DNA
atccagatgctctacaaatg

SEQ ID NO: 45098 - DNA, 20 bp, synthetic construct
  misc_feature 1..20: note = chemically synthesized
  source 1..20: mol_type = other DNA
tccagatgctctacaaatgc

SEQ ID NO: 45099 - DNA, 20 bp, synthetic construct
  misc_feature 1..20: note = chemically synthesized
  source 1..20: mol_type = other DNA
agatgctctacaaatgcagg

SEQ ID NO: 45100 - DNA, 20 bp, synthetic construct
  misc_feature 1..20: note = chemically synthesized
  source 1..20: mol_type = other DNA
tgctctacaaatgcaggcag

SEQ ID NO: 45101 - DNA, 20 bp, synthetic construct
  misc_feature 1..20: note = chemically synthesized
  source 1..20: mol_type = other DNA
gctctacaaatgcaggcaga

SEQ ID NO: 45102 - DNA, 20 bp, synthetic construct
  misc_feature 1..20: note = chemically synthesized
  source 1..20: mol_type = other DNA
ctctacaaatgcaggcagaa

SEQ ID NO: 45103 - DNA, 20 bp, synthetic construct
  misc_feature 1..20: note = chemically synthesized
  source 1..20: mol_type = other DNA
tgcaggcagaagggatgact

SEQ ID NO: 45104 - DNA, 20 bp, synthetic construct
  misc_feature 1..20: note = chemically synthesized
  source 1..20: mol_type = other DNA
ggcagaagggatgactaagt

SEQ ID NO: 45105 - DNA, 20 bp, synthetic construct
  misc_feature 1..20: note = chemically synthesized
  source 1..20: mol_type = other DNA
aagggatgactaagtgagca

SEQ ID NO: 45106 - DNA, 20 bp, synthetic construct
  misc_feature 1..20: note = chemically synthesized
  source 1..20: mol_type = other DNA
agggatgactaagtgagcaa

SEQ ID NO: 45107 - DNA, 20 bp, synthetic construct
  misc_feature 1..20: note = chemically synthesized
  source 1..20: mol_type = other DNA
agcaaaggcaacacttctta

SEQ ID NO: 45108 - DNA, 20 bp, synthetic construct
  misc_feature 1..20: note = chemically synthesized
  source 1..20: mol_type = other DNA
caaaggcaacacttcttaaa

SEQ ID NO: 45109 - DNA, 20 bp, synthetic construct
  misc_feature 1..20: note = chemically synthesized
  source 1..20: mol_type = other DNA
aaggcaacacttcttaaaga

SEQ ID NO: 45110 - DNA, 20 bp, synthetic construct
  misc_feature 1..20: note = chemically synthesized
  source 1..20: mol_type = other DNA
ggcaacacttcttaaagaga

SEQ ID NO: 45111 - DNA, 20 bp, synthetic construct
  misc_feature 1..20: note = chemically synthesized
  source 1..20: mol_type = other DNA
cacttcttaaagagagagaa

SEQ ID NO: 45112 - DNA, 20 bp, synthetic construct
  misc_feature 1..20: note = chemically synthesized
  source 1..20: mol_type = other DNA
cttaaagagagagaaaagtc

SEQ ID NO: 45113 - DNA, 20 bp, synthetic construct
  misc_feature 1..20: note = chemically synthesized
  source 1..20: mol_type = other DNA
ttaaagagagagaaaagtca

SEQ ID NO: 45114 - DNA, 20 bp, synthetic construct
  misc_feature 1..20: note = chemically synthesized
  source 1..20: mol_type = other DNA
aaaagtcaaggccactgtct

SEQ ID NO: 45115 - DNA, 20 bp, synthetic construct
  misc_feature 1..20: note = chemically synthesized
  source 1..20: mol_type = other DNA
tccttttgtgttgctatata

SEQ ID NO: 45116 - DNA, 20 bp, synthetic construct
  misc_feature 1..20: note = chemically synthesized
  source 1..20: mol_type = other DNA
ccttttgtgttgctatataa

SEQ ID NO: 45117 - DNA, 20 bp, synthetic construct
  misc_feature 1..20: note = chemically synthesized
  source 1..20: mol_type = other DNA
gctatataaaggaatacctg

SEQ ID NO: 45118 - DNA, 20 bp, synthetic construct
  misc_feature 1..20: note = chemically synthesized
  source 1..20: mol_type = other DNA
ctatataaaggaatacctga

SEQ ID NO: 45119 - DNA, 20 bp, synthetic construct
  misc_feature 1..20: note = chemically synthesized
  source 1..20: mol_type = other DNA
ataaaggaatacctgaaggt

SEQ ID NO: 45120 - DNA, 20 bp, synthetic construct
  misc_feature 1..20: note = chemically synthesized
  source 1..20: mol_type = other DNA
cctgaaggtgagtaatttac

SEQ ID NO: 45121 - DNA, 20 bp, synthetic construct
  misc_feature 1..20: note = chemically synthesized
  source 1..20: mol_type = other DNA
ctgaaggtgagtaatttaca

SEQ ID NO: 45122 - DNA, 20 bp, synthetic construct
  misc_feature 1..20: note = chemically synthesized
  source 1..20: mol_type = other DNA
ggtgagtaatttacaaggaa

SEQ ID NO: 45123 - DNA, 20 bp, synthetic construct
  misc_feature 1..20: note = chemically synthesized
  source 1..20: mol_type = other DNA
gtgagtaatttacaaggaaa

SEQ ID NO: 45124 - DNA, 20 bp, synthetic construct
  misc_feature 1..20: note = chemically synthesized
  source 1..20: mol_type = other DNA
tgagtaatttacaaggaaaa

SEQ ID NO: 45125 - DNA, 20 bp, synthetic construct
  misc_feature 1..20: note = chemically synthesized
  source 1..20: mol_type = other DNA
acaaggaaaagggatttatt

SEQ ID NO: 45126 - DNA, 20 bp, synthetic construct
  misc_feature 1..20: note = chemically synthesized
  source 1..20: mol_type = other DNA
tattcagctcatgattctgc

SEQ ID NO: 45127 - DNA, 20 bp, synthetic construct
  misc_feature 1..20: note = chemically synthesized
  source 1..20: mol_type = other DNA
tcatgattctgcaagctctc

SEQ ID NO: 45128 - DNA, 20 bp, synthetic construct
  misc_feature 1..20: note = chemically synthesized
  source 1..20: mol_type = other DNA
catgattctgcaagctctcc

SEQ ID NO: 45129 - DNA, 20 bp, synthetic construct
  misc_feature 1..20: note = chemically synthesized
  source 1..20: mol_type = other DNA
gattctgcaagctctccagg

SEQ ID NO: 45130 - DNA, 20 bp, synthetic construct
  misc_feature 1..20: note = chemically synthesized
  source 1..20: mol_type = other DNA
tgcaagctctccaggaagca

SEQ ID NO: 45131 - DNA, 20 bp, synthetic construct
  misc_feature 1..20: note = chemically synthesized
  source 1..20: mol_type = other DNA
ctctccaggaagcatggcac

SEQ ID NO: 45132 - DNA, 20 bp, synthetic construct
  misc_feature 1..20: note = chemically synthesized
  source 1..20: mol_type = other DNA
atggcaccagcatctgcttc

SEQ ID NO: 45133 - DNA, 20 bp, synthetic construct
  misc_feature 1..20: note = chemically synthesized
  source 1..20: mol_type = other DNA
caccagcatctgcttctggt

SEQ ID NO: 45134 - DNA, 20 bp, synthetic construct
  misc_feature 1..20: note = chemically synthesized
  source 1..20: mol_type = other DNA
accagcatctgcttctggtg

SEQ ID NO: 45135 - DNA, 20 bp, synthetic construct
  misc_feature 1..20: note = chemically synthesized
  source 1..20: mol_type = other DNA
ccagcatctgcttctggtga

SEQ ID NO: 45136 - DNA, 20 bp, synthetic construct
  misc_feature 1..20: note = chemically synthesized
  source 1..20: mol_type = other DNA
ctgcttctggtgagggcctt

SEQ ID NO: 45137 - DNA, 20 bp, synthetic construct
  misc_feature 1..20: note = chemically synthesized
  source 1..20: mol_type = other DNA
ccttaagctgctttcactga

SEQ ID NO: 45138 - DNA, 20 bp, synthetic construct
  misc_feature 1..20: note = chemically synthesized
  source 1..20: mol_type = other DNA
taagctgctttcactgatgg

SEQ ID NO: 45139 - DNA, 20 bp, synthetic construct
  misc_feature 1..20: note = chemically synthesized
  source 1..20: mol_type = other DNA
gctgctttcactgatggcag

SEQ ID NO: 45140 - DNA, 20 bp, synthetic construct
  misc_feature 1..20: note = chemically synthesized
  source 1..20: mol_type = other DNA
ctgctttcactgatggcaga

SEQ ID NO: 45141 - DNA, 20 bp, synthetic construct
  misc_feature 1..20: note = chemically synthesized
  source 1..20: mol_type = other DNA
ttcactgatggcagaaggtg

SEQ ID NO: 45142 - DNA, 20 bp, synthetic construct
  misc_feature 1..20: note = chemically synthesized
  source 1..20: mol_type = other DNA
tcactgatggcagaaggtga

SEQ ID NO: 45143 - DNA, 20 bp, synthetic construct
  misc_feature 1..20: note = chemically synthesized
  source 1..20: mol_type = other DNA
cactgatggcagaaggtgaa

SEQ ID NO: 45144 - DNA, 20 bp, synthetic construct
  misc_feature 1..20: note = chemically synthesized
  source 1..20: mol_type = other DNA
actgatggcagaaggtgaag

SEQ ID NO: 45145 - DNA, 20 bp, synthetic construct
  misc_feature 1..20: note = chemically synthesized
  source 1..20: mol_type = other DNA
tgatggcagaaggtgaaggg

SEQ ID NO: 45146 - DNA, 20 bp, synthetic construct
  misc_feature 1..20: note = chemically synthesized
  source 1..20: mol_type = other DNA
tgaaggggagcctacatgtg

SEQ ID NO: 45147 - DNA, 20 bp, synthetic construct
  misc_feature 1..20: note = chemically synthesized
  source 1..20: mol_type = other DNA
aaggggagcctacatgtgca

SEQ ID NO: 45148 - DNA, 20 bp, synthetic construct
  misc_feature 1..20: note = chemically synthesized
  source 1..20: mol_type = other DNA
atgtgcagagatcaatcaca

SEQ ID NO: 45149 - DNA, 20 bp, synthetic construct
  misc_feature 1..20: note = chemically synthesized
  source 1..20: mol_type = other DNA
gcagagatcaatcacatggc

SEQ ID NO: 45150 - DNA, 20 bp, synthetic construct
  misc_feature 1..20: note = chemically synthesized
  source 1..20: mol_type = other DNA
agagatcaatcacatggcaa

SEQ ID NO: 45151 - DNA, 20 bp, synthetic construct
  misc_feature 1..20: note = chemically synthesized
  source 1..20: mol_type = other DNA
gatcaatcacatggcaagag

SEQ ID NO: 45152 - DNA, 20 bp, synthetic construct
  misc_feature 1..20: note = chemically synthesized
  source 1..20: mol_type = other DNA
caatcacatggcaagagaag

SEQ ID NO: 45153 - DNA, 20 bp, synthetic construct
  misc_feature 1..20: note = chemically synthesized
  source 1..20: mol_type = other DNA
cacatggcaagagaagaagc

SEQ ID NO: 45154 - DNA, 20 bp, synthetic construct
  misc_feature 1..20: note = chemically synthesized
  source 1..20: mol_type = other DNA
catggcaagagaagaagcaa

SEQ ID NO: 45155 - DNA, 20 bp, synthetic construct
  misc_feature 1..20: note = chemically synthesized
  source 1..20: mol_type = other DNA
tggcaagagaagaagcaaga

SEQ ID NO: 45156 - DNA, 20 bp, synthetic construct
  misc_feature 1..20: note = chemically synthesized
  source 1..20: mol_type = other DNA
caagagaagaagcaagagag

SEQ ID NO: 45157 - DNA, 20 bp, synthetic construct
  misc_feature 1..20: note = chemically synthesized
  source 1..20: mol_type = other DNA
agagaagaagcaagagagaa

SEQ ID NO: 45158 - DNA, 20 bp, synthetic construct
  misc_feature 1..20: note = chemically synthesized
  source 1..20: mol_type = other DNA
agaagaagcaagagagaaga

SEQ ID NO: 45159 - DNA, 20 bp, synthetic construct
  misc_feature 1..20: note = chemically synthesized
  source 1..20: mol_type = other DNA
gaagaagcaagagagaagag

SEQ ID NO: 45160 - DNA, 20 bp, synthetic construct
  misc_feature 1..20: note = chemically synthesized
  source 1..20: mol_type = other DNA
aagaagcaagagagaagaga

SEQ ID NO: 45161 - DNA, 20 bp, synthetic construct
  misc_feature 1..20: note = chemically synthesized
  source 1..20: mol_type = other DNA
gaagcaagagagaagagagg

SEQ ID NO: 45162 - DNA, 20 bp, synthetic construct
  misc_feature 1..20: note = chemically synthesized
  source 1..20: mol_type = other DNA
aagcaagagagaagagaggg

SEQ ID NO: 45163 - DNA, 20 bp, synthetic construct
  misc_feature 1..20: note = chemically synthesized
  source 1..20: mol_type = other DNA
agagaagagagggaggtgcc

SEQ ID NO: 45164 - DNA, 20 bp, synthetic construct
  misc_feature 1..20: note = chemically synthesized
  source 1..20: mol_type = other DNA
gccaagctctttttaataat

SEQ ID NO: 45165 - DNA, 20 bp, synthetic construct
  misc_feature 1..20: note = chemically synthesized
  source 1..20: mol_type = other DNA
ctttttaataatcagccttc

SEQ ID NO: 45166 - DNA, 20 bp, synthetic construct
  misc_feature 1..20: note = chemically synthesized
  source 1..20: mol_type = other DNA
tttttaataatcagccttca

SEQ ID NO: 45167 - DNA, 20 bp, synthetic construct
  misc_feature 1..20: note = chemically synthesized
  source 1..20: mol_type = other DNA
ttttaataatcagccttcaa

SEQ ID NO: 45168 - DNA, 20 bp, synthetic construct
  misc_feature 1..20: note = chemically synthesized
  source 1..20: mol_type = other DNA
tcagccttcaagggaaatca

SEQ ID NO: 45169 - DNA, 20 bp, synthetic construct
  misc_feature 1..20: note = chemically synthesized
  source 1..20: mol_type = other DNA
gccttcaagggaaatcatag

SEQ ID NO: 45170 - DNA, 20 bp, synthetic construct
  misc_feature 1..20: note = chemically synthesized
  source 1..20: mol_type = other DNA
ccttcaagggaaatcatagc

SEQ ID NO: 45171 - DNA, 20 bp, synthetic construct
  misc_feature 1..20: note = chemically synthesized
  source 1..20: mol_type = other DNA
ttcaagggaaatcatagcgg

SEQ ID NO: 45172 - DNA, 20 bp, synthetic construct
  misc_feature 1..20: note = chemically synthesized
  source 1..20: mol_type = other DNA
gagaacttactcattatcac

SEQ ID NO: 45173 - DNA, 20 bp, synthetic construct
  misc_feature 1..20: note = chemically synthesized
  source 1..20: mol_type = other DNA
agaacttactcattatcaca

SEQ ID NO: 45174 - DNA, 20 bp, synthetic construct
  misc_feature 1..20: note = chemically synthesized
  source 1..20: mol_type = other DNA
cttactcattatcacaagga

SEQ ID NO: 45175 - DNA, 20 bp, synthetic construct
  misc_feature 1..20: note = chemically synthesized
  source 1..20: mol_type = other DNA
attatcacaaggacggcacc

SEQ ID NO: 45176 - DNA, 20 bp, synthetic construct
  misc_feature 1..20: note = chemically synthesized
  source 1..20: mol_type = other DNA
ggacggcaccaagcctttca

SEQ ID NO: 45177 - DNA, 20 bp, synthetic construct
  misc_feature 1..20: note = chemically synthesized
  source 1..20: mol_type = other DNA
gacggcaccaagcctttcac

SEQ ID NO: 45178 - DNA, 20 bp, synthetic construct
  misc_feature 1..20: note = chemically synthesized
  source 1..20: mol_type = other DNA
acggcaccaagcctttcaca

SEQ ID NO: 45179 - DNA, 20 bp, synthetic construct
  misc_feature 1..20: note = chemically synthesized
  source 1..20: mol_type = other DNA
cggcaccaagcctttcacag

SEQ ID NO: 45180 - DNA, 20 bp, synthetic construct
  misc_feature 1..20: note = chemically synthesized
  source 1..20: mol_type = other DNA
atgacccaaacacctcccat

SEQ ID NO: 45181 - DNA, 20 bp, synthetic construct
  misc_feature 1..20: note = chemically synthesized
  source 1..20: mol_type = other DNA
tgacccaaacacctcccatt

SEQ ID NO: 45182 - DNA, 20 bp, synthetic construct
  misc_feature 1..20: note = chemically synthesized
  source 1..20: mol_type = other DNA
taggccccacttccaacact

SEQ ID NO: 45183 - DNA, 20 bp, synthetic construct
  misc_feature 1..20: note = chemically synthesized
  source 1..20: mol_type = other DNA
aggccccacttccaacactg

SEQ ID NO: 45184 - DNA, 20 bp, synthetic construct
  misc_feature 1..20: note = chemically synthesized
  source 1..20: mol_type = other DNA
tgaggaccaaatttccacat

SEQ ID NO: 45185 - DNA, 20 bp, synthetic construct
  misc_feature 1..20: note = chemically synthesized
  source 1..20: mol_type = other DNA
ccaaatttccacatgagatt

SEQ ID NO: 45186 - DNA, 20 bp, synthetic construct
  misc_feature 1..20: note = chemically synthesized
  source 1..20: mol_type = other DNA
aaatttccacatgagatttg

SEQ ID NO: 45187 - DNA, 20 bp, synthetic construct
  misc_feature 1..20: note = chemically synthesized
  source 1..20: mol_type = other DNA
aatttccacatgagatttgg

SEQ ID NO: 45188 - DNA, 20 bp, synthetic construct
  misc_feature 1..20: note = chemically synthesized
  source 1..20: mol_type = other DNA
atttccacatgagatttgga

SEQ ID NO: 45189 - DNA, 20 bp, synthetic construct
  misc_feature 1..20: note = chemically synthesized
  source 1..20: mol_type = other DNA
tttccacatgagatttggag

SEQ ID NO: 45190 - DNA, 20 bp, synthetic construct
  misc_feature 1..20: note = chemically synthesized
  source 1..20: mol_type = other DNA
tggaggggacaaacaaatta

SEQ ID NO: 45191 - DNA, 20 bp, synthetic construct
  misc_feature 1..20: note = chemically synthesized
  source 1..20: mol_type = other DNA
aggggacaaacaaattatag

SEQ ID NO: 45192 - DNA, 20 bp, synthetic construct
  misc_feature 1..20: note = chemically synthesized
  source 1..20: mol_type = other DNA
attatagcagccactatcta

SEQ ID NO: 45193 - DNA, 20 bp, synthetic construct
  misc_feature 1..20: note = chemically synthesized
  source 1..20: mol_type = other DNA
actatctatggtgatttgtt

SEQ ID NO: 45194 - DNA, 20 bp, synthetic construct
  misc_feature 1..20: note = chemically synthesized
  source 1..20: mol_type = other DNA
atggtgatttgtttggtttt

SEQ ID NO: 45195 - DNA, 20 bp, synthetic construct
  misc_feature 1..20: note = chemically synthesized
  source 1..20: mol_type = other DNA
ttgtctgctccaactgctct

SEQ ID NO: 45196 - DNA, 20 bp, synthetic construct
  misc_feature 1..20: note = chemically synthesized
  source 1..20: mol_type = other DNA
tgtctgctccaactgctctc

SEQ ID NO: 45197 - DNA, 20 bp, synthetic construct
  misc_feature 1..20: note = chemically synthesized
  source 1..20: mol_type = other DNA
ctgctccaactgctctcagg

SEQ ID NO: 45198 - DNA, 20 bp, synthetic construct
  misc_feature 1..20: note = chemically synthesized
  source 1..20: mol_type = other DNA
tcaggcagacatacctgctt

SEQ ID NO: 45199 - DNA, 20 bp, synthetic construct
  misc_feature 1..20: note = chemically synthesized
  source 1..20: mol_type = other DNA
acctgcttaagaaccttcac

SEQ ID NO: 45200 - DNA, 20 bp, synthetic construct
  misc_feature 1..20: note = chemically synthesized
  source 1..20: mol_type = other DNA
gaaccttcactggctcccca

SEQ ID NO: 45201 - DNA, 20 bp, synthetic construct
  misc_feature 1..20: note = chemically synthesized
  source 1..20: mol_type = other DNA
tccccacagcctcatgaatc

SEQ ID NO: 45202 - DNA, 20 bp, synthetic construct
  misc_feature 1..20: note = chemically synthesized
  source 1..20: mol_type = other DNA
ccaaactccatgctcctcct

SEQ ID NO: 45203 - DNA, 20 bp, synthetic construct
  misc_feature 1..20: note = chemically synthesized
  source 1..20: mol_type = other DNA
ccctacctcaacctaccttg

SEQ ID NO: 45204 - DNA, 20 bp, synthetic construct
  misc_feature 1..20: note = chemically synthesized
  source 1..20: mol_type = other DNA
atctctgtatatatgcatct

SEQ ID NO: 45205 - DNA, 20 bp, synthetic construct
  misc_feature 1..20: note = chemically synthesized
  source 1..20: mol_type = other DNA
tatatatgcatcttggactc

SEQ ID NO: 45206 - DNA, 20 bp, synthetic construct
  misc_feature 1..20: note = chemically synthesized
  source 1..20: mol_type = other DNA
tatgcatcttggactccagt

SEQ ID NO: 45207 - DNA, 20 bp, synthetic construct
  misc_feature 1..20: note = chemically synthesized
  source 1..20: mol_type = other DNA
tgcatcttggactccagtca

SEQ ID NO: 45208 - DNA, 20 bp, synthetic construct
  misc_feature 1..20: note = chemically synthesized
  source 1..20: mol_type = other DNA
atcttggactccagtcagag

SEQ ID NO: 45209 - DNA, 20 bp, synthetic construct
  misc_feature 1..20: note = chemically synthesized
  source 1..20: mol_type = other DNA
ggactccagtcagagtagaa

SEQ ID NO: 45210 - DNA, 20 bp, synthetic construct
  misc_feature 1..20: note = chemically synthesized
  source 1..20: mol_type = other DNA
actccagtcagagtagaaca

SEQ ID NO: 45211 - DNA, 20 bp, synthetic construct
  misc_feature 1..20: note = chemically synthesized
  source 1..20: mol_type = other DNA
gagtccaccccctttaccca

SEQ ID NO: 45212 - DNA, 20 bp, synthetic construct
  misc_feature 1..20: note = chemically synthesized
  source 1..20: mol_type = other DNA
accccctttacccaaagcct

SEQ ID NO: 45213 - DNA, 20 bp, synthetic construct
  misc_feature 1..20: note = chemically synthesized
  source 1..20: mol_type = other DNA
ccccctttacccaaagcctt

SEQ ID NO: 45214 - DNA, 20 bp, synthetic construct
  misc_feature 1..20: note = chemically synthesized
  source 1..20: mol_type = other DNA
cccctttacccaaagcctta

SEQ ID NO: 45215 - DNA, 20 bp, synthetic construct
  misc_feature 1..20: note = chemically synthesized
  source 1..20: mol_type = other DNA
ccaaagccttagggccaaaa

SEQ ID NO: 45216 - DNA, 20 bp, synthetic construct
  misc_feature 1..20: note = chemically synthesized
  source 1..20: mol_type = other DNA
gccaaaacggttttgaacct

SEQ ID NO: 45217 - DNA, 20 bp, synthetic construct
  misc_feature 1..20: note = chemically synthesized
  source 1..20: mol_type = other DNA
tttgaacctcagaacttgtt

SEQ ID NO: 45218 - DNA, 20 bp, synthetic construct
  misc_feature 1..20: note = chemically synthesized
  source 1..20: mol_type = other DNA
ctcagaacttgtttggattt

SEQ ID NO: 45219 - DNA, 20 bp, synthetic construct
  misc_feature 1..20: note = chemically synthesized
  source 1..20: mol_type = other DNA
gaacttgtttggattttaga

SEQ ID NO: 45220 - DNA, 20 bp, synthetic construct
  misc_feature 1..20: note = chemically synthesized
  source 1..20: mol_type = other DNA
aacttgtttggattttagaa

SEQ ID NO: 45221 - DNA, 20 bp, synthetic construct
  misc_feature 1..20: note = chemically synthesized
  source 1..20: mol_type = other DNA
ttgtttggattttagaaagg

SEQ ID NO: 45222 - DNA, 20 bp, synthetic construct
  misc_feature 1..20: note = chemically synthesized
  source 1..20: mol_type = other DNA
ggattttagaaaggcagtaa

SEQ ID NO: 45223 - DNA, 20 bp, synthetic construct
  misc_feature 1..20: note = chemically synthesized
  source 1..20: mol_type = other DNA
gattttagaaaggcagtaat

SEQ ID NO: 45224 - DNA, 20 bp, synthetic construct
  misc_feature 1..20: note = chemically synthesized
  source 1..20: mol_type = other DNA
gaaaggcagtaatgggcaat

SEQ ID NO: 45225 - DNA, 20 bp, synthetic construct
  misc_feature 1..20: note = chemically synthesized
  source 1..20: mol_type = other DNA
aaggcagtaatgggcaatca

SEQ ID NO: 45226 - DNA, 20 bp, synthetic construct
  misc_feature 1..20: note = chemically synthesized
  source 1..20: mol_type = other DNA
atgggcaatcagagtctgct

SEQ ID NO: 45227 - DNA, 20 bp, synthetic construct
  misc_feature 1..20: note = chemically synthesized
  source 1..20: mol_type = other DNA
ggcaatcagagtctgcttgg

SEQ ID NO: 45228 - DNA, 20 bp, synthetic construct
  misc_feature 1..20: note = chemically synthesized
  source 1..20: mol_type = other DNA
agagtctgcttggaagaatc

SEQ ID NO: 45229 - DNA, 20 bp, synthetic construct
  misc_feature 1..20: note = chemically synthesized
  source 1..20: mol_type = other DNA
agtctgcttggaagaatctg

SEQ ID NO: 45230 - DNA, 20 bp, synthetic construct
  misc_feature 1..20: note = chemically synthesized
  source 1..20: mol_type = other DNA
gctgcatactgtaatctatg

SEQ ID NO: 45231 - DNA, 20 bp, synthetic construct
  misc_feature 1..20: note = chemically synthesized
  source 1..20: mol_type = other DNA
aattaaaaataatctcatgt

SEQ ID NO: 45232 - DNA, 20 bp, synthetic construct
  misc_feature 1..20: note = chemically synthesized
  source 1..20: mol_type = other DNA
aatctcatgtcagttcacgt

SEQ ID NO: 45233 - DNA, 20 bp, synthetic construct
  misc_feature 1..20: note = chemically synthesized
  source 1..20: mol_type = other DNA
atctcatgtcagttcacgtc

SEQ ID NO: 45234 - DNA, 20 bp, synthetic construct
  misc_feature 1..20: note = chemically synthesized
  source 1..20: mol_type = other DNA
taaatcacaaaaaaaacttt

SEQ ID NO: 45235 - DNA, 20 bp, synthetic construct
  misc_feature 1..20: note = chemically synthesized
  source 1..20: mol_type = other DNA
tttcgtaacattttacattt

SEQ ID NO: 45236 - DNA, 20 bp, synthetic construct
  misc_feature 1..20: note = chemically synthesized
  source 1..20: mol_type = other DNA
gtaacattttacatttcaga

SEQ ID NO: 45237 - DNA, 20 bp, synthetic construct
  misc_feature 1..20: note = chemically synthesized
  source 1..20: mol_type = other DNA
acattttacatttcagacgg

SEQ ID NO: 45238 - DNA, 20 bp, synthetic construct
  misc_feature 1..20: note = chemically synthesized
  source 1..20: mol_type = other DNA
tacatttcagacggtggata

SEQ ID NO: 45239 - DNA, 20 bp, synthetic construct
  misc_feature 1..20: note = chemically synthesized
  source 1..20: mol_type = other DNA
agacggtggataaagaactg

SEQ ID NO: 45240 - DNA, 20 bp, synthetic construct
  misc_feature 1..20: note = chemically synthesized
  source 1..20: mol_type = other DNA
acggtggataaagaactgtg

SEQ ID NO: 45241 - DNA, 20 bp, synthetic construct
  misc_feature 1..20: note = chemically synthesized
  source 1..20: mol_type = other DNA
cggtggataaagaactgtgg

SEQ ID NO: 45242 - DNA, 20 bp, synthetic construct
  misc_feature 1..20: note = chemically synthesized
  source 1..20: mol_type = other DNA
ggataaagaactgtggaggc

SEQ ID NO: 45243 - DNA, 20 bp, synthetic construct
  misc_feature 1..20: note = chemically synthesized
  source 1..20: mol_type = other DNA
gataaagaactgtggaggcc

SEQ ID NO: 45244 - DNA, 20 bp, synthetic construct
  misc_feature 1..20: note = chemically synthesized
  source 1..20: mol_type = other DNA
agaactgtggaggccaggcg

SEQ ID NO: 45245 - DNA, 20 bp, synthetic construct
  misc_feature 1..20: note = chemically synthesized
  source 1..20: mol_type = other DNA
actgtggaggccaggcgtgg

SEQ ID NO: 45246 - DNA, 20 bp, synthetic construct
  misc_feature 1..20: note = chemically synthesized
  source 1..20: mol_type = other DNA
gtggctcacacctgtaattc

SEQ ID NO: 45247 - DNA, 20 bp, synthetic construct
  misc_feature 1..20: note = chemically synthesized
  source 1..20: mol_type = other DNA
cacctgtaattcgagcactt

SEQ ID NO: 45248 - DNA, 20 bp, synthetic construct
  misc_feature 1..20: note = chemically synthesized
  source 1..20: mol_type = other DNA
acctgtaattcgagcacttt

SEQ ID NO: 45249 - DNA, 20 bp, synthetic construct
  misc_feature 1..20: note = chemically synthesized
  source 1..20: mol_type = other DNA
ctgtaattcgagcactttgg

SEQ ID NO: 45250 - DNA, 20 bp, synthetic construct
  misc_feature 1..20: note = chemically synthesized
  source 1..20: mol_type = other DNA
tgtaattcgagcactttggg

SEQ ID NO: 45251 - DNA, 20 bp, synthetic construct
  misc_feature 1..20: note = chemically synthesized
  source 1..20: mol_type = other DNA
ttcgagcactttgggaggct

SEQ ID NO: 45252 - DNA, 20 bp, synthetic construct
  misc_feature 1..20: note = chemically synthesized
  source 1..20: mol_type = other DNA
tcgagcactttgggaggctg

SEQ ID NO: 45253 - DNA, 20 bp, synthetic construct
  misc_feature 1..20: note = chemically synthesized
  source 1..20: mol_type = other DNA
agcactttgggaggctgagg

SEQ ID NO: 45254 - DNA, 20 bp, synthetic construct
  misc_feature 1..20: note = chemically synthesized
  source 1..20: mol_type = other DNA
gcactttgggaggctgaggc

SEQ ID NO: 45255 - DNA, 20 bp, synthetic construct
  misc_feature 1..20: note = chemically synthesized
  source 1..20: mol_type = other DNA
actttgggaggctgaggcgg

SEQ ID NO: 45256 - DNA, 20 bp, synthetic construct
  misc_feature 1..20: note = chemically synthesized
  source 1..20: mol_type = other DNA
ctttgggaggctgaggcggg

SEQ ID NO: 45257 - DNA, 20 bp, synthetic construct
  misc_feature 1..20: note = chemically synthesized
  source 1..20: mol_type = other DNA
aggcgggaggatcacctcct

SEQ ID NO: 45258 - DNA, 20 bp, synthetic construct
  misc_feature 1..20: note = chemically synthesized
  source 1..20: mol_type = other DNA
atcacctcctcggatccact

SEQ ID NO: 45259 - DNA, 20 bp, synthetic construct
  misc_feature 1..20: note = chemically synthesized
  source 1..20: mol_type = other DNA
tcacctcctcggatccactg

SEQ ID NO: 45260 - DNA, 20 bp, synthetic construct
  misc_feature 1..20: note = chemically synthesized
  source 1..20: mol_type = other DNA
acctcctcggatccactgag

SEQ ID NO: 45261 - DNA, 20 bp, synthetic construct
  misc_feature 1..20: note = chemically synthesized
  source 1..20: mol_type = other DNA
cctcctcggatccactgagg

SEQ ID NO: 45262 - DNA, 20 bp, synthetic construct
  misc_feature 1..20: note = chemically synthesized
  source 1..20: mol_type = other DNA
ctcggatccactgaggaggt

SEQ ID NO: 45263 - DNA, 20 bp, synthetic construct
  misc_feature 1..20: note = chemically synthesized
  source 1..20: mol_type = other DNA
tcggatccactgaggaggtc

SEQ ID NO: 45264 - DNA, 20 bp, synthetic construct
  misc_feature 1..20: note = chemically synthesized
  source 1..20: mol_type = other DNA
ggatccactgaggaggtcag

SEQ ID NO: 45265 - DNA, 20 bp, synthetic construct
  misc_feature 1..20: note = chemically synthesized
  source 1..20: mol_type = other DNA
ggaggtcaggagtttgcgac

SEQ ID NO: 45266 - DNA, 20 bp, synthetic construct
  misc_feature 1..20: note = chemically synthesized
  source 1..20: mol_type = other DNA
tcaggagtttgcgactagcc

SEQ ID NO: 45267 - DNA, 20 bp, synthetic construct
  misc_feature 1..20: note = chemically synthesized
  source 1..20: mol_type = other DNA
tgcgactagcctggccaacg

SEQ ID NO: 45268 - DNA, 20 bp, synthetic construct
  misc_feature 1..20: note = chemically synthesized
  source 1..20: mol_type = other DNA
tctactaaaaatacaaaaat

SEQ ID NO: 45269 - DNA, 20 bp, synthetic construct
  misc_feature 1..20: note = chemically synthesized
  source 1..20: mol_type = other DNA
ctaaaaatacaaaaattagc

SEQ ID NO: 45270 - DNA, 20 bp, synthetic construct
  misc_feature 1..20: note = chemically synthesized
  source 1..20: mol_type = other DNA
taaaaatacaaaaattagcc

SEQ ID NO: 45271 - DNA, 20 bp, synthetic construct
  misc_feature 1..20: note = chemically synthesized
  source 1..20: mol_type = other DNA
atacaaaaattagccgggcg

SEQ ID NO: 45272 - DNA, 20 bp, synthetic construct
  misc_feature 1..20: note = chemically synthesized
  source 1..20: mol_type = other DNA
caaaaattagccgggcgtgg

SEQ ID NO: 45273 - DNA, 20 bp, synthetic construct
  misc_feature 1..20: note = chemically synthesized
  source 1..20: mol_type = other DNA
aaattagccgggcgtggtgg

SEQ ID NO: 45274 - DNA, 20 bp, synthetic construct
  misc_feature 1..20: note = chemically synthesized
  source 1..20: mol_type = other DNA
aattagccgggcgtggtggc

SEQ ID NO: 45275 - DNA, 20 bp, synthetic construct
  misc_feature 1..20: note = chemically synthesized
  source 1..20: mol_type = other DNA
gtggcaggtacctgtaatcc

SEQ ID NO: 45276 - DNA, 20 bp, synthetic construct
  misc_feature 1..20: note = chemically synthesized
  source 1..20: mol_type = other DNA
tacctgtaatcccagcttct

SEQ ID NO: 45277 - DNA, 20 bp, synthetic construct
  misc_feature 1..20: note = chemically synthesized
  source 1..20: mol_type = other DNA
acctgtaatcccagcttctt

SEQ ID NO: 45278 - DNA, 20 bp, synthetic construct
  misc_feature 1..20: note = chemically synthesized
  source 1..20: mol_type = other DNA
ctgtaatcccagcttcttgg

SEQ ID NO: 45279 - DNA, 20 bp, synthetic construct
  misc_feature 1..20: note = chemically synthesized
  source 1..20: mol_type = other DNA
tgtaatcccagcttcttggg

SEQ ID NO: 45280 - DNA, 20 bp, synthetic construct
  misc_feature 1..20: note = chemically synthesized
  source 1..20: mol_type = other DNA
tcccagcttcttgggaggct

SEQ ID NO: 45281 - DNA, 20 bp, synthetic construct
  misc_feature 1..20: note = chemically synthesized
  source 1..20: mol_type = other DNA
cccagcttcttgggaggctg

SEQ ID NO: 45282 - DNA, 20 bp, synthetic construct
  misc_feature 1..20: note = chemically synthesized
  source 1..20: mol_type = other DNA
agcttcttgggaggctgagg

SEQ ID NO: 45283 - DNA, 20 bp, synthetic construct
  misc_feature 1..20: note = chemically synthesized
  source 1..20: mol_type = other DNA
gcttcttgggaggctgaggc

SEQ ID NO: 45284 - DNA, 20 bp, synthetic construct
  misc_feature 1..20: note = chemically synthesized
  source 1..20: mol_type = other DNA
ttcttgggaggctgaggcag

SEQ ID NO: 45285 - DNA, 20 bp, synthetic construct
  misc_feature 1..20: note = chemically synthesized
  source 1..20: mol_type = other DNA
gcaggagaaccacttgaacc

SEQ ID NO: 45286 - DNA, 20 bp, synthetic construct
  misc_feature 1..20: note = chemically synthesized
  source 1..20: mol_type = other DNA
caggagaaccacttgaaccc

SEQ ID NO: 45287 - DNA, 20 bp, synthetic construct
  misc_feature 1..20: note = chemically synthesized
  source 1..20: mol_type = other DNA
ggagaaccacttgaacccgg

SEQ ID NO: 45288 - DNA, 20 bp, synthetic construct
  misc_feature 1..20: note = chemically synthesized
  source 1..20: mol_type = other DNA
aaccacttgaacccgggaga

SEQ ID NO: 45289 - DNA, 20 bp, synthetic construct
  misc_feature 1..20: note = chemically synthesized
  source 1..20: mol_type = other DNA
aacccgggagacagatgttg

SEQ ID NO: 45290 - DNA, 20 bp, synthetic construct
  misc_feature 1..20: note = chemically synthesized
  source 1..20: mol_type = other DNA
cgggagacagatgttgcagt

SEQ ID NO: 45291 - DNA, 20 bp, synthetic construct
  misc_feature 1..20: note = chemically synthesized
  source 1..20: mol_type = other DNA
gacagatgttgcagtgagct

SEQ ID NO: 45292 - DNA, 20 bp, synthetic construct
  misc_feature 1..20: note = chemically synthesized
  source 1..20: mol_type = other DNA
gagactgcaccattgcactc

SEQ ID NO: 45293 - DNA, 20 bp, synthetic construct
  misc_feature 1..20: note = chemically synthesized
  source 1..20: mol_type = other DNA
tgcaccattgcactccagcc

SEQ ID NO: 45294 - DNA, 20 bp, synthetic construct
  misc_feature 1..20: note = chemically synthesized
  source 1..20: mol_type = other DNA
gcaccattgcactccagcct

SEQ ID NO: 45295 - DNA, 20 bp, synthetic construct
  misc_feature 1..20: note = chemically synthesized
  source 1..20: mol_type = other DNA
tgcactccagcctgggcaac

SEQ ID NO: 45296 - DNA, 20 bp, synthetic construct
  misc_feature 1..20: note = chemically synthesized
  source 1..20: mol_type = other DNA
cactccagcctgggcaacaa

SEQ ID NO: 45297 - DNA, 20 bp, synthetic construct
  misc_feature 1..20: note = chemically synthesized
  source 1..20: mol_type = other DNA
aaactccatctcaaaaaaaa

SEQ ID NO: 45298 - DNA, 20 bp, synthetic construct
  misc_feature 1..20: note = chemically synthesized
  source 1..20: mol_type = other DNA
catctcaaaaaaaaaagaaa

SEQ ID NO: 45299 - DNA, 20 bp, synthetic construct
  misc_feature 1..20: note = chemically synthesized
  source 1..20: mol_type = other DNA
aaaaaaaagaaaaagaactg

SEQ ID NO: 45300 - DNA, 20 bp, synthetic construct
  misc_feature 1..20: note = chemically synthesized
  source 1..20: mol_type = other DNA
tgctccttatcttccacctc

SEQ ID NO: 45301 - DNA, 20 bp, synthetic construct
  misc_feature 1..20: note = chemically synthesized
  source 1..20: mol_type = other DNA
tcttccacctctggttttcc

SEQ ID NO: 45302 - DNA, 20 bp, synthetic construct
  misc_feature 1..20: note = chemically synthesized
  source 1..20: mol_type = other DNA
cagctctgtatctttgttca

SEQ ID NO: 45303 - DNA, 20 bp, synthetic construct
  misc_feature 1..20: note = chemically synthesized
  source 1..20: mol_type = other DNA
ttcatggtacctcctaatcc

SEQ ID NO: 45304 - DNA, 20 bp, synthetic construct
  misc_feature 1..20: note = chemically synthesized
  source 1..20: mol_type = other DNA
gaactcctactaatgcttca

SEQ ID NO: 45305 - DNA, 20 bp, synthetic construct
  misc_feature 1..20: note = chemically synthesized
  source 1..20: mol_type = other DNA
taaataaaaattgaatgaat

SEQ ID NO: 45306 - DNA, 20 bp, synthetic construct
  misc_feature 1..20: note = chemically synthesized
  source 1..20: mol_type = other DNA
aaataaaaattgaatgaatt

SEQ ID NO: 45307 - DNA, 20 bp, synthetic construct
  misc_feature 1..20: note = chemically synthesized
  source 1..20: mol_type = other DNA
ataaaaattgaatgaattgg

SEQ ID NO: 45308 - DNA, 20 bp, synthetic construct
  misc_feature 1..20: note = chemically synthesized
  source 1..20: mol_type = other DNA
aaaaattgaatgaattggga

SEQ ID NO: 45309 - DNA, 20 bp, synthetic construct
  misc_feature 1..20: note = chemically synthesized
  source 1..20: mol_type = other DNA
aattgggagagtactctgtg

SEQ ID NO: 45310 - DNA, 20 bp, synthetic construct
  misc_feature 1..20: note = chemically synthesized
  source 1..20: mol_type = other DNA
tgggagagtactctgtgcag

SEQ ID NO: 45311 - DNA, 20 bp, synthetic construct
  misc_feature 1..20: note = chemically synthesized
  source 1..20: mol_type = other DNA
ggagagtactctgtgcagtg

SEQ ID NO: 45312 - DNA, 20 bp, synthetic construct
  misc_feature 1..20: note = chemically synthesized
  source 1..20: mol_type = other DNA
tactctgtgcagtggagtgt

SEQ ID NO: 45313 - DNA, 20 bp, synthetic construct
  misc_feature 1..20: note = chemically synthesized
  source 1..20: mol_type = other DNA
gtgcagtggagtgtcagttc

SEQ ID NO: 45314 - DNA, 20 bp, synthetic construct
  misc_feature 1..20: note = chemically synthesized
  source 1..20: mol_type = other DNA
gagtgtcagttctggaaacc

SEQ ID NO: 45315 - DNA, 20 bp, synthetic construct
  misc_feature 1..20: note = chemically synthesized
  source 1..20: mol_type = other DNA
aaacccagttctaatgcacc

SEQ ID NO: 45316 - DNA, 20 bp, synthetic construct
  misc_feature 1..20: note = chemically synthesized
  source 1..20: mol_type = other DNA
aacccagttctaatgcacct

SEQ ID NO: 45317 - DNA, 20 bp, synthetic construct
  misc_feature 1..20: note = chemically synthesized
  source 1..20: mol_type = other DNA
acccagttctaatgcacctg

SEQ ID NO: 45318 - DNA, 20 bp, synthetic construct
  misc_feature 1..20: note = chemically synthesized
  source 1..20: mol_type = other DNA
ctggggtgacctcctctctc

SEQ ID NO: 45319 - DNA, 20 bp, synthetic construct
  misc_feature 1..20: note = chemically synthesized
  source 1..20: mol_type = other DNA
tggggtgacctcctctctct

SEQ ID NO: 45320 - DNA, 20 bp, synthetic construct
  misc_feature 1..20: note = chemically synthesized
  source 1..20: mol_type = other DNA
gacctcctctctctgggcct

SEQ ID NO: 45321 - DNA, 20 bp, synthetic construct
  misc_feature 1..20: note = chemically synthesized
  source 1..20: mol_type = other DNA
cctcagtttctcatgactaa

SEQ ID NO: 45322 - DNA, 20 bp, synthetic construct
  misc_feature 1..20: note = chemically synthesized
  source 1..20: mol_type = other DNA
gtttctcatgactaaaagaa

SEQ ID NO: 45323 - DNA, 20 bp, synthetic construct
  misc_feature 1..20: note = chemically synthesized
  source 1..20: mol_type = other DNA
tttctcatgactaaaagaaa

SEQ ID NO: 45324 - DNA, 20 bp, synthetic construct
  misc_feature 1..20: note = chemically synthesized
  source 1..20: mol_type = other DNA
catgactaaaagaaaaggat

SEQ ID NO: 45325 - DNA, 20 bp, synthetic construct
  misc_feature 1..20: note = chemically synthesized
  source 1..20: mol_type = other DNA
atgaatgaataaatgaactt

SEQ ID NO: 45326 - DNA, 20 bp, synthetic construct
  misc_feature 1..20: note = chemically synthesized
  source 1..20: mol_type = other DNA
tgaatgaataaatgaacttg

SEQ ID NO: 45327 - DNA, 20 bp, synthetic construct
  misc_feature 1..20: note = chemically synthesized
  source 1..20: mol_type = other DNA
aatgaataaatgaacttgag

SEQ ID NO: 45328 - DNA, 20 bp, synthetic construct
  misc_feature 1..20: note = chemically synthesized
  source 1..20: mol_type = other DNA
atgaataaatgaacttgagg

SEQ ID NO: 45329 - DNA, 20 bp, synthetic construct
  misc_feature 1..20: note = chemically synthesized
  source 1..20: mol_type = other DNA
ctcctgttccaaacttccac

SEQ ID NO: 45330 - DNA, 20 bp, synthetic construct
  misc_feature 1..20: note = chemically synthesized
  source 1..20: mol_type = other DNA
cctgttccaaacttccacca

SEQ ID NO: 45331 - DNA, 20 bp, synthetic construct
  misc_feature 1..20: note = chemically synthesized
  source 1..20: mol_type = other DNA
gttccaaacttccaccagag

SEQ ID NO: 45332 - DNA, 20 bp, synthetic construct
  misc_feature 1..20: note = chemically synthesized
  source 1..20: mol_type = other DNA
accagagaagaaacatcctc

SEQ ID NO: 45333 - DNA, 20 bp, synthetic construct
  misc_feature 1..20: note = chemically synthesized
  source 1..20: mol_type = other DNA
ccagagaagaaacatcctca

SEQ ID NO: 45334 - DNA, 20 bp, synthetic construct
  misc_feature 1..20: note = chemically synthesized
  source 1..20: mol_type = other DNA
cagagaagaaacatcctcaa

SEQ ID NO: 45335 - DNA, 20 bp, synthetic construct
  misc_feature 1..20: note = chemically synthesized
  source 1..20: mol_type = other DNA
aagaaacatcctcaagggct

SEQ ID NO: 45336 - DNA, 20 bp, synthetic construct
  misc_feature 1..20: note = chemically synthesized
  source 1..20: mol_type = other DNA
acatcctcaagggcttggtt

SEQ ID NO: 45337 - DNA, 20 bp, synthetic construct
  misc_feature 1..20: note = chemically synthesized
  source 1..20: mol_type = other DNA
catcctcaagggcttggttc

SEQ ID NO: 45338 - DNA, 20 bp, synthetic construct
  misc_feature 1..20: note = chemically synthesized
  source 1..20: mol_type = other DNA
cctcaagggcttggttcagg

SEQ ID NO: 45339 - DNA, 20 bp, synthetic construct
  misc_feature 1..20: note = chemically synthesized
  source 1..20: mol_type = other DNA
gcttggttcaggtggtcata

SEQ ID NO: 45340 - DNA, 20 bp, synthetic construct
  misc_feature 1..20: note = chemically synthesized
  source 1..20: mol_type = other DNA
gcctctgcttactcacctct

SEQ ID NO: 45341 - DNA, 20 bp, synthetic construct
  misc_feature 1..20: note = chemically synthesized
  source 1..20: mol_type = other DNA
cctctgcttactcacctctc

SEQ ID NO: 45342 - DNA, 20 bp, synthetic construct
  misc_feature 1..20: note = chemically synthesized
  source 1..20: mol_type = other DNA
tgcttactcacctctcagga

SEQ ID NO: 45343 - DNA, 20 bp, synthetic construct
  misc_feature 1..20: note = chemically synthesized
  source 1..20: mol_type = other DNA
gcttactcacctctcaggat

SEQ ID NO: 45344 - DNA, 20 bp, synthetic construct
  misc_feature 1..20: note = chemically synthesized
  source 1..20: mol_type = other DNA
cttactcacctctcaggatg

SEQ ID NO: 45345 - DNA, 20 bp, synthetic construct
  misc_feature 1..20: note = chemically synthesized
  source 1..20: mol_type = other DNA
gatggggtactcactatttc

SEQ ID NO: 45346 - DNA, 20 bp, synthetic construct
  misc_feature 1..20: note = chemically synthesized
  source 1..20: mol_type = other DNA
ggtactcactatttccagaa

SEQ ID NO: 45347 - DNA, 20 bp, synthetic construct
  misc_feature 1..20: note = chemically synthesized
  source 1..20: mol_type = other DNA
tatttccagaacagttgttt

SEQ ID NO: 45348 - DNA, 20 bp, synthetic construct
  misc_feature 1..20: note = chemically synthesized
  source 1..20: mol_type = other DNA
tttccagaacagttgttttg

SEQ ID NO: 45349 - DNA, 20 bp, synthetic construct
  misc_feature 1..20: note = chemically synthesized
  source 1..20: mol_type = other DNA
ccagaacagttgttttggag

SEQ ID NO: 45350 - DNA, 20 bp, synthetic construct
  misc_feature 1..20: note = chemically synthesized
  source 1..20: mol_type = other DNA
gaacagttgttttggagcag

SEQ ID NO: 45351 - DNA, 20 bp, synthetic construct
  misc_feature 1..20: note = chemically synthesized
  source 1..20: mol_type = other DNA
tgaaatgccctttcttatcc

SEQ ID NO: 45352 - DNA, 20 bp, synthetic construct
  misc_feature 1..20: note = chemically synthesized
  source 1..20: mol_type = other DNA
acaaccccacaacatccctc

SEQ ID NO: 45353 - DNA, 20 bp, synthetic construct
  misc_feature 1..20: note = chemically synthesized
  source 1..20: mol_type = other DNA
ccccacaacatccctcgaga

SEQ ID NO: 45354 - DNA, 20 bp, synthetic construct
  misc_feature 1..20: note = chemically synthesized
  source 1..20: mol_type = other DNA
aacatccctcgagaaagtca

SEQ ID NO: 45355 - DNA, 20 bp, synthetic construct
  misc_feature 1..20: note = chemically synthesized
  source 1..20: mol_type = other DNA
acatccctcgagaaagtcaa

SEQ ID NO: 45356 - DNA, 20 bp, synthetic construct
  misc_feature 1..20: note = chemically synthesized
  source 1..20: mol_type = other DNA
cctcgagaaagtcaaaggct

SEQ ID NO: 45357 - DNA, 20 bp, synthetic construct
  misc_feature 1..20: note = chemically synthesized
  source 1..20: mol_type = other DNA
ctcgagaaagtcaaaggctc

SEQ ID NO: 45358 - DNA, 20 bp, synthetic construct
  misc_feature 1..20: note = chemically synthesized
  source 1..20: mol_type = other DNA
tcgagaaagtcaaaggctca

SEQ ID NO: 45359 - DNA, 20 bp, synthetic construct
  misc_feature 1..20: note = chemically synthesized
  source 1..20: mol_type = other DNA
aagtcaaaggctcagggaac

SEQ ID NO: 45360 - DNA, 20 bp, synthetic construct
  misc_feature 1..20: note = chemically synthesized
  source 1..20: mol_type = other DNA
agtcaaaggctcagggaaca

SEQ ID NO: 45361 - DNA, 20 bp, synthetic construct
  misc_feature 1..20: note = chemically synthesized
  source 1..20: mol_type = other DNA
caaaggctcagggaacaagg

SEQ ID NO: 45362 - DNA, 20 bp, synthetic construct
  misc_feature 1..20: note = chemically synthesized
  source 1..20: mol_type = other DNA
aaggctcagggaacaaggaa

SEQ ID NO: 45363 - DNA, 20 bp, synthetic construct
  misc_feature 1..20: note = chemically synthesized
  source 1..20: mol_type = other DNA
aggctcagggaacaaggaag

SEQ ID NO: 45364 - DNA, 20 bp, synthetic construct
  misc_feature 1..20: note = chemically synthesized
  source 1..20: mol_type = other DNA
ggctcagggaacaaggaaga

SEQ ID NO: 45365 - DNA, 20 bp, synthetic construct
  misc_feature 1..20: note = chemically synthesized
  source 1..20: mol_type = other DNA
acaaggaagagggctatact

SEQ ID NO: 45366 - DNA, 20 bp, synthetic construct
  misc_feature 1..20: note = chemically synthesized
  source 1..20: mol_type = other DNA
gaagagggctatactgagct

SEQ ID NO: 45367 - DNA, 20 bp, synthetic construct
  misc_feature 1..20: note = chemically synthesized
  source 1..20: mol_type = other DNA
agggctatactgagctgagt

SEQ ID NO: 45368 - DNA, 20 bp, synthetic construct
  misc_feature 1..20: note = chemically synthesized
  source 1..20: mol_type = other DNA
gggctatactgagctgagta

SEQ ID NO: 45369 - DNA, 20 bp, synthetic construct
  misc_feature 1..20: note = chemically synthesized
  source 1..20: mol_type = other DNA
ggacttgccatcctgccacc

SEQ ID NO: 45370 - DNA, 20 bp, synthetic construct
  misc_feature 1..20: note = chemically synthesized
  source 1..20: mol_type = other DNA
atcctgccacccagcacact

SEQ ID NO: 45371 - DNA, 20 bp, synthetic construct
  misc_feature 1..20: note = chemically synthesized
  source 1..20: mol_type = other DNA
tgccacccagcacactcaga

SEQ ID NO: 45372 - DNA, 20 bp, synthetic construct
  misc_feature 1..20: note = chemically synthesized
  source 1..20: mol_type = other DNA
cacccagcacactcagacag

SEQ ID NO: 45373 - DNA, 20 bp, synthetic construct
  misc_feature 1..20: note = chemically synthesized
  source 1..20: mol_type = other DNA
agcacactcagacagaagcg

SEQ ID NO: 45374 - DNA, 20 bp, synthetic construct
  misc_feature 1..20: note = chemically synthesized
  source 1..20: mol_type = other DNA
gcacactcagacagaagcgt

SEQ ID NO: 45375 - DNA, 20 bp, synthetic construct
  misc_feature 1..20: note = chemically synthesized
  source 1..20: mol_type = other DNA
cactcagacagaagcgtggg

SEQ ID NO: 45376 - DNA, 20 bp, synthetic construct
  misc_feature 1..20: note = chemically synthesized
  source 1..20: mol_type = other DNA
actcagacagaagcgtgggc

SEQ ID NO: 45377 - DNA, 20 bp, synthetic construct
  misc_feature 1..20: note = chemically synthesized
  source 1..20: mol_type = other DNA
cagacagaagcgtgggcagg

SEQ ID NO: 45378 - DNA, 20 bp, synthetic construct
  misc_feature 1..20: note = chemically synthesized
  source 1..20: mol_type = other DNA
aagcgtgggcaggcagctgt

SEQ ID NO: 45379 - DNA, 20 bp, synthetic construct
  misc_feature 1..20: note = chemically synthesized
  source 1..20: mol_type = other DNA
cgtgggcaggcagctgtgag

SEQ ID NO: 45380 - DNA, 20 bp, synthetic construct
  misc_feature 1..20: note = chemically synthesized
  source 1..20: mol_type = other DNA
gggcaggcagctgtgagtgg

SEQ ID NO: 45381 - DNA, 20 bp, synthetic construct
  misc_feature 1..20: note = chemically synthesized
  source 1..20: mol_type = other DNA
cagaattttcccctctgccc

SEQ ID NO: 45382 - DNA, 20 bp, synthetic construct
  misc_feature 1..20: note = chemically synthesized
  source 1..20: mol_type = other DNA
agaattttcccctctgcccc

SEQ ID NO: 45383 - DNA, 20 bp, synthetic construct
  misc_feature 1..20: note = chemically synthesized
  source 1..20: mol_type = other DNA
aattttcccctctgccccag

SEQ ID NO: 45384 - DNA, 20 bp, synthetic construct
  misc_feature 1..20: note = chemically synthesized
  source 1..20: mol_type = other DNA
cccctctgccccaggagctg

SEQ ID NO: 45385 - DNA, 20 bp, synthetic construct
  misc_feature 1..20: note = chemically synthesized
  source 1..20: mol_type = other DNA
ctgccccaggagctgtggtt

SEQ ID NO: 45386 - DNA, 20 bp, synthetic construct
  misc_feature 1..20: note = chemically synthesized
  source 1..20: mol_type = other DNA
gccccaggagctgtggtttg

SEQ ID NO: 45387 - DNA, 20 bp, synthetic construct
  misc_feature 1..20: note = chemically synthesized
  source 1..20: mol_type = other DNA
aggagctgtggtttggagca

SEQ ID NO: 45388 - DNA, 20 bp, synthetic construct
  misc_feature 1..20: note = chemically synthesized
  source 1..20: mol_type = other DNA
agcaaagacaatgtcaccaa

SEQ ID NO: 45389 - DNA, 20 bp, synthetic construct
  misc_feature 1..20: note = chemically synthesized
  source 1..20: mol_type = other DNA
gcaaagacaatgtcaccaac

SEQ ID NO: 45390 - DNA, 20 bp, synthetic construct
  misc_feature 1..20: note = chemically synthesized
  source 1..20: mol_type = other DNA
gtcaccaacaggtcacactg

SEQ ID NO: 45391 - DNA, 20 bp, synthetic construct
  misc_feature 1..20: note = chemically synthesized
  source 1..20: mol_type = other DNA
ccaacaggtcacactgcaga

SEQ ID NO: 45392 - DNA, 20 bp, synthetic construct
  misc_feature 1..20: note = chemically synthesized
  source 1..20: mol_type = other DNA
caacaggtcacactgcagac

SEQ ID NO: 45393 - DNA, 20 bp, synthetic construct
  misc_feature 1..20: note = chemically synthesized
  source 1..20: mol_type = other DNA
aacaggtcacactgcagaca

SEQ ID NO: 45394 - DNA, 20 bp, synthetic construct
  misc_feature 1..20: note = chemically synthesized
  source 1..20: mol_type = other DNA
gcagacagggacaaaactgc

SEQ ID NO: 45395 - DNA, 20 bp, synthetic construct
  misc_feature 1..20: note = chemically synthesized
  source 1..20: mol_type = other DNA
aaaactgcaagtgatccccc

SEQ ID NO: 45396 - DNA, 20 bp, synthetic construct
  misc_feature 1..20: note = chemically synthesized
  source 1..20: mol_type = other DNA
aaactgcaagtgatcccccc

SEQ ID NO: 45397 - DNA, 20 bp, synthetic construct
  misc_feature 1..20: note = chemically synthesized
  source 1..20: mol_type = other DNA
aactgcaagtgatccccccg

SEQ ID NO: 45398 - DNA, 20 bp, synthetic construct
  misc_feature 1..20: note = chemically synthesized
  source 1..20: mol_type = other DNA
ccccccggggcttgcattgt

SEQ ID NO: 45399 - DNA, 20 bp, synthetic construct
  misc_feature 1..20: note = chemically synthesized
  source 1..20: mol_type = other DNA
ttgcattgtaagttcactca

SEQ ID NO: 45400 - DNA, 20 bp, synthetic construct
  misc_feature 1..20: note = chemically synthesized
  source 1..20: mol_type = other DNA
gtaagttcactcatggtcaa

SEQ ID NO: 45401 - DNA, 20 bp, synthetic construct
  misc_feature 1..20: note = chemically synthesized
  source 1..20: mol_type = other DNA
tctccccatctgctgccact

SEQ ID NO: 45402 - DNA, 20 bp, synthetic construct
  misc_feature 1..20: note = chemically synthesized
  source 1..20: mol_type = other DNA
catctgctgccactgagccg

SEQ ID NO: 45403 - DNA, 20 bp, synthetic construct
  misc_feature 1..20: note = chemically synthesized
  source 1..20: mol_type = other DNA
atctgctgccactgagccgt

SEQ ID NO: 45404 - DNA, 20 bp, synthetic construct
  misc_feature 1..20: note = chemically synthesized
  source 1..20: mol_type = other DNA
tctgctgccactgagccgta

SEQ ID NO: 45405 - DNA, 20 bp, synthetic construct
  misc_feature 1..20: note = chemically synthesized
  source 1..20: mol_type = other DNA
cgattgtcacctccctttta

SEQ ID NO: 45406 - DNA, 20 bp, synthetic construct
  misc_feature 1..20: note = chemically synthesized
  source 1..20: mol_type = other DNA
gtcacctcccttttaaagat

SEQ ID NO: 45407 - DNA, 20 bp, synthetic construct
  misc_feature 1..20: note = chemically synthesized
  source 1..20: mol_type = other DNA
tcacctcccttttaaagatt

SEQ ID NO: 45408 - DNA, 20 bp, synthetic construct
  misc_feature 1..20: note = chemically synthesized
  source 1..20: mol_type = other DNA
cccttttaaagattaggcaa

SEQ ID NO: 45409 - DNA, 20 bp, synthetic construct
  misc_feature 1..20: note = chemically synthesized
  source 1..20: mol_type = other DNA
cttttaaagattaggcaatg

SEQ ID NO: 45410 - DNA, 20 bp, synthetic construct
  misc_feature 1..20: note = chemically synthesized
  source 1..20: mol_type = other DNA
ttttaaagattaggcaatgg

SEQ ID NO: 45411 - DNA, 20 bp, synthetic construct
  misc_feature 1..20: note = chemically synthesized
  source 1..20: mol_type = other DNA
agattaggcaatggaggctc

SEQ ID NO: 45412 - DNA, 20 bp, synthetic construct
  misc_feature 1..20: note = chemically synthesized
  source 1..20: mol_type = other DNA
gattaggcaatggaggctca

SEQ ID NO: 45413 - DNA, 20 bp, synthetic construct
  misc_feature 1..20: note = chemically synthesized
  source 1..20: mol_type = other DNA
ggcaatggaggctcaaggat

SEQ ID NO: 45414 - DNA, 20 bp, synthetic construct
  misc_feature 1..20: note = chemically synthesized
  source 1..20: mol_type = other DNA
tcaaggataagtgacttgtc

SEQ ID NO: 45415 - DNA, 20 bp, synthetic construct
  misc_feature 1..20: note = chemically synthesized
  source 1..20: mol_type = other DNA
aagtgacttgtcaagcacca

SEQ ID NO: 45416 - DNA, 20 bp, synthetic construct
  misc_feature 1..20: note = chemically synthesized
  source 1..20: mol_type = other DNA
gacttgtcaagcaccacagc

SEQ ID NO: 45417 - DNA, 20 bp, synthetic construct
  misc_feature 1..20: note = chemically synthesized
  source 1..20: mol_type = other DNA
tgtcaagcaccacagctagt

SEQ ID NO: 45418 - DNA, 20 bp, synthetic construct
  misc_feature 1..20: note = chemically synthesized
  source 1..20: mol_type = other DNA
tcaagcaccacagctagtga

SEQ ID NO: 45419 - DNA, 20 bp, synthetic construct
  misc_feature 1..20: note = chemically synthesized
  source 1..20: mol_type = other DNA
caagcaccacagctagtgag

SEQ ID NO: 45420 - DNA, 20 bp, synthetic construct
  misc_feature 1..20: note = chemically synthesized
  source 1..20: mol_type = other DNA
gcaccacagctagtgagagg

SEQ ID NO: 45421 - DNA, 20 bp, synthetic construct
  misc_feature 1..20: note = chemically synthesized
  source 1..20: mol_type = other DNA
acagctagtgagaggaagcc

SEQ ID NO: 45422 - DNA, 20 bp, synthetic construct
  misc_feature 1..20: note = chemically synthesized
  source 1..20: mol_type = other DNA
tcaaccccacatctgactcc

SEQ ID NO: 45423 - DNA, 20 bp, synthetic construct
  misc_feature 1..20: note = chemically synthesized
  source 1..20: mol_type = other DNA
ccccacatctgactccaagc

SEQ ID NO: 45424 - DNA, 20 bp, synthetic construct
  misc_feature 1..20: note = chemically synthesized
  source 1..20: mol_type = other DNA
cccacatctgactccaagct

SEQ ID NO: 45425 - DNA, 20 bp, synthetic construct
  misc_feature 1..20: note = chemically synthesized
  source 1..20: mol_type = other DNA
ccacatctgactccaagctg

SEQ ID NO: 45426 - DNA, 20 bp, synthetic construct
  misc_feature 1..20: note = chemically synthesized
  source 1..20: mol_type = other DNA
cacatctgactccaagctgg

SEQ ID NO: 45427 - DNA, 20 bp, synthetic construct
  misc_feature 1..20: note = chemically synthesized
  source 1..20: mol_type = other DNA
tgactccaagctgggggaca

SEQ ID NO: 45428 - DNA, 20 bp, synthetic construct
  misc_feature 1..20: note = chemically synthesized
  source 1..20: mol_type = other DNA
agctgggggacacagaacct

SEQ ID NO: 45429 - DNA, 20 bp, synthetic construct
  misc_feature 1..20: note = chemically synthesized
  source 1..20: mol_type = other DNA
ggggacacagaacctcagcc

SEQ ID NO: 45430 - DNA, 20 bp, synthetic construct
  misc_feature 1..20: note = chemically synthesized
  source 1..20: mol_type = other DNA
acagaacctcagccaagtcc

SEQ ID NO: 45431 - DNA, 20 bp, synthetic construct
  misc_feature 1..20: note = chemically synthesized
  source 1..20: mol_type = other DNA
cagaacctcagccaagtcct

SEQ ID NO: 45432 - DNA, 20 bp, synthetic construct
  misc_feature 1..20: note = chemically synthesized
  source 1..20: mol_type = other DNA
acctcagccaagtcctgggc

SEQ ID NO: 45433 - DNA, 20 bp, synthetic construct
  misc_feature 1..20: note = chemically synthesized
  source 1..20: mol_type = other DNA
agtcctgggctggtaatact

SEQ ID NO: 45434 - DNA, 20 bp, synthetic construct
  misc_feature 1..20: note = chemically synthesized
  source 1..20: mol_type = other DNA
gggctggtaatacttagaaa

SEQ ID NO: 45435 - DNA, 20 bp, synthetic construct
  misc_feature 1..20: note = chemically synthesized
  source 1..20: mol_type = other DNA
tggtaatacttagaaaaagc

SEQ ID NO: 45436 - DNA, 20 bp, synthetic construct
  misc_feature 1..20: note = chemically synthesized
  source 1..20: mol_type = other DNA
taatacttagaaaaagctag

SEQ ID NO: 45437 - DNA, 20 bp, synthetic construct
  misc_feature 1..20: note = chemically synthesized
  source 1..20: mol_type = other DNA
aaaagctagtggtctcgccc

SEQ ID NO: 45438 - DNA, 20 bp, synthetic construct
  misc_feature 1..20: note = chemically synthesized
  source 1..20: mol_type = other DNA
aaagctagtggtctcgcccc

SEQ ID NO: 45439 - DNA, 20 bp, synthetic construct
  misc_feature 1..20: note = chemically synthesized
  source 1..20: mol_type = other DNA
gctagtggtctcgccccggg

SEQ ID NO: 45440 - DNA, 20 bp, synthetic construct
  misc_feature 1..20: note = chemically synthesized
  source 1..20: mol_type = other DNA
agtggtctcgccccgggaag

SEQ ID NO: 45441 - DNA, 20 bp, synthetic construct
  misc_feature 1..20: note = chemically synthesized
  source 1..20: mol_type = other DNA
ccccgggaagaagcttccca

SEQ ID NO: 45442 - DNA, 20 bp, synthetic construct
  misc_feature 1..20: note = chemically synthesized
  source 1..20: mol_type = other DNA
gaagaagcttcccacagcct

SEQ ID NO: 45443 - DNA, 20 bp, synthetic construct
  misc_feature 1..20: note = chemically synthesized
  source 1..20: mol_type = other DNA
aagaagcttcccacagcctg

SEQ ID NO: 45444 - DNA, 20 bp, synthetic construct
  misc_feature 1..20: note = chemically synthesized
  source 1..20: mol_type = other DNA
agaagcttcccacagcctga

SEQ ID NO: 45445 - DNA, 20 bp, synthetic construct
  misc_feature 1..20: note = chemically synthesized
  source 1..20: mol_type = other DNA
gcttcccacagcctgagggc

SEQ ID NO: 45446 - DNA, 20 bp, synthetic construct
  misc_feature 1..20: note = chemically synthesized
  source 1..20: mol_type = other DNA
tcccacagcctgagggccag

SEQ ID NO: 45447 - DNA, 20 bp, synthetic construct
  misc_feature 1..20: note = chemically synthesized
  source 1..20: mol_type = other DNA
acagcctgagggccagaagc

SEQ ID NO: 45448 - DNA, 20 bp, synthetic construct
  misc_feature 1..20: note = chemically synthesized
  source 1..20: mol_type = other DNA
gcctgagggccagaagctgg

SEQ ID NO: 45449 - DNA, 20 bp, synthetic construct
  misc_feature 1..20: note = chemically synthesized
  source 1..20: mol_type = other DNA
ctgagggccagaagctggca

SEQ ID NO: 45450 - DNA, 20 bp, synthetic construct
  misc_feature 1..20: note = chemically synthesized
  source 1..20: mol_type = other DNA
cagaagctggcagagttgtt

SEQ ID NO: 45451 - DNA, 20 bp, synthetic construct
  misc_feature 1..20: note = chemically synthesized
  source 1..20: mol_type = other DNA
gagcaaactcgccccgcaca

SEQ ID NO: 45452 - DNA, 20 bp, synthetic construct
  misc_feature 1..20: note = chemically synthesized
  source 1..20: mol_type = other DNA
aaactcgccccgcacacggt

SEQ ID NO: 45453 - DNA, 20 bp, synthetic construct
  misc_feature 1..20: note = chemically synthesized
  source 1..20: mol_type = other DNA
ctcgccccgcacacggtcgg

SEQ ID NO: 45454 - DNA, 20 bp, synthetic construct
  misc_feature 1..20: note = chemically synthesized
  source 1..20: mol_type = other DNA
ccccgcacacggtcggcaga

SEQ ID NO: 45455 - DNA, 20 bp, synthetic construct
  misc_feature 1..20: note = chemically synthesized
  source 1..20: mol_type = other DNA
gcacacggtcggcagacagc

SEQ ID NO: 45456 - DNA, 20 bp, synthetic construct
  misc_feature 1..20: note = chemically synthesized
  source 1..20: mol_type = other DNA
cacacggtcggcagacagcc

SEQ ID NO: 45457 - DNA, 20 bp, synthetic construct
  misc_feature 1..20: note = chemically synthesized
  source 1..20: mol_type = other DNA
acggtcggcagacagccagg

SEQ ID NO: 45458 - DNA, 20 bp, synthetic construct
  misc_feature 1..20: note = chemically synthesized
  source 1..20: mol_type = other DNA
cggtcggcagacagccaggt

SEQ ID NO: 45459 - DNA, 20 bp, synthetic construct
  misc_feature 1..20: note = chemically synthesized
  source 1..20: mol_type = other DNA
ggcagacagccaggtgggct

SEQ ID NO: 45460 - DNA, 20 bp, synthetic construct
  misc_feature 1..20: note = chemically synthesized
  source 1..20: mol_type = other DNA
gcagacagccaggtgggctg

SEQ ID NO: 45461 - DNA, 20 bp, synthetic construct
  misc_feature 1..20: note = chemically synthesized
  source 1..20: mol_type = other DNA
agccaggtgggctgaggcgc

SEQ ID NO: 45462 - DNA, 20 bp, synthetic construct
  misc_feature 1..20: note = chemically synthesized
  source 1..20: mol_type = other DNA
gccaggtgggctgaggcgcc

SEQ ID NO: 45463 - DNA, 20 bp, synthetic construct
  misc_feature 1..20: note = chemically synthesized
  source 1..20: mol_type = other DNA
gtgggctgaggcgccgggct

SEQ ID NO: 45464 - DNA, 20 bp, synthetic construct
  misc_feature 1..20: note = chemically synthesized
  source 1..20: mol_type = other DNA
tgaggcgccgggctcagctc

SEQ ID NO: 45465 - DNA, 20 bp, synthetic construct
  misc_feature 1..20: note = chemically synthesized
  source 1..20: mol_type = other DNA
gaggcgccgggctcagctcc

SEQ ID NO: 45466 - DNA, 20 bp, synthetic construct
  misc_feature 1..20: note = chemically synthesized
  source 1..20: mol_type = other DNA
aggcgccgggctcagctccg

SEQ ID NO: 45467 - DNA, 20 bp, synthetic construct
  misc_feature 1..20: note = chemically synthesized
  source 1..20: mol_type = other DNA
cgggctcagctccggggtcc

SEQ ID NO: 45468 - DNA, 20 bp, synthetic construct
  misc_feature 1..20: note = chemically synthesized
  source 1..20: mol_type = other DNA
cagctccggggtcccagtac

SEQ ID NO: 45469 - DNA, 20 bp, synthetic construct
  misc_feature 1..20: note = chemically synthesized
  source 1..20: mol_type = other DNA
agctccggggtcccagtacc

SEQ ID NO: 45470 - DNA, 20 bp, synthetic construct
  misc_feature 1..20: note = chemically synthesized
  source 1..20: mol_type = other DNA
agtaccaggcgcaccacctc

SEQ ID NO: 45471 - DNA, 20 bp, synthetic construct
  misc_feature 1..20: note = chemically synthesized
  source 1..20: mol_type = other DNA
aggcgcaccacctccggctc

SEQ ID NO: 45472 - DNA, 20 bp, synthetic construct
  misc_feature 1..20: note = chemically synthesized
  source 1..20: mol_type = other DNA
gcgcaccacctccggctcca

SEQ ID NO: 45473 - DNA, 20 bp, synthetic construct
  misc_feature 1..20: note = chemically synthesized
  source 1..20: mol_type = other DNA
acctccggctccagagcacc

SEQ ID NO: 45474 - DNA, 20 bp, synthetic construct
  misc_feature 1..20: note = chemically synthesized
  source 1..20: mol_type = other DNA
cctccggctccagagcacca

SEQ ID NO: 45475 - DNA, 20 bp, synthetic construct
  misc_feature 1..20: note = chemically synthesized
  source 1..20: mol_type = other DNA
ctccggctccagagcaccaa

SEQ ID NO: 45476 - DNA, 20 bp, synthetic construct
  misc_feature 1..20: note = chemically synthesized
  source 1..20: mol_type = other DNA
ccaagggcccttccctgcct

SEQ ID NO: 45477 - DNA, 20 bp, synthetic construct
  misc_feature 1..20: note = chemically synthesized
  source 1..20: mol_type = other DNA
ccttccctgcctgagtccta

SEQ ID NO: 45478 - DNA, 20 bp, synthetic construct
  misc_feature 1..20: note = chemically synthesized
  source 1..20: mol_type = other DNA
cttccctgcctgagtcctaa

SEQ ID NO: 45479 - DNA, 20 bp, synthetic construct
  misc_feature 1..20: note = chemically synthesized
  source 1..20: mol_type = other DNA
tgagtcctaaaggacgccaa

SEQ ID NO: 45480 - DNA, 20 bp, synthetic construct
  misc_feature 1..20: note = chemically synthesized
  source 1..20: mol_type = other DNA
gagtcctaaaggacgccaat

SEQ ID NO: 45481 - DNA, 20 bp, synthetic construct
  misc_feature 1..20: note = chemically synthesized
  source 1..20: mol_type = other DNA
aaaggacgccaatgggcctc

SEQ ID NO: 45482 - DNA, 20 bp, synthetic construct
  misc_feature 1..20: note = chemically synthesized
  source 1..20: mol_type = other DNA
ccccttctcccctgcccctt

SEQ ID NO: 45483 - DNA, 20 bp, synthetic construct
  misc_feature 1..20: note = chemically synthesized
  source 1..20: mol_type = other DNA
ttctcccctgccccttcagc

SEQ ID NO: 45484 - DNA, 20 bp, synthetic construct
  misc_feature 1..20: note = chemically synthesized
  source 1..20: mol_type = other DNA
cttcagctggttcttttctt

SEQ ID NO: 45485 - DNA, 20 bp, synthetic construct
  misc_feature 1..20: note = chemically synthesized
  source 1..20: mol_type = other DNA
gttcttttcttcggctgaaa

SEQ ID NO: 45486 - DNA, 20 bp, synthetic construct
  misc_feature 1..20: note = chemically synthesized
  source 1..20: mol_type = other DNA
ttttcttcggctgaaacaga

SEQ ID NO: 45487 - DNA, 20 bp, synthetic construct
  misc_feature 1..20: note = chemically synthesized
  source 1..20: mol_type = other DNA
ggctgaaacagatggaatac

SEQ ID NO: 45488 - DNA, 20 bp, synthetic construct
  misc_feature 1..20: note = chemically synthesized
  source 1..20: mol_type = other DNA
ctgaaacagatggaatacta

SEQ ID NO: 45489 - DNA, 20 bp, synthetic construct
  misc_feature 1..20: note = chemically synthesized
  source 1..20: mol_type = other DNA
cagatggaatactagagcat

SEQ ID NO: 45490 - DNA, 20 bp, synthetic construct
  misc_feature 1..20: note = chemically synthesized
  source 1..20: mol_type = other DNA
agcatgagttctgtgtcata

SEQ ID NO: 45491 - DNA, 20 bp, synthetic construct
  misc_feature 1..20: note = chemically synthesized
  source 1..20: mol_type = other DNA
aagaaattgcctcgtgctcc

SEQ ID NO: 45492 - DNA, 20 bp, synthetic construct
  misc_feature 1..20: note = chemically synthesized
  source 1..20: mol_type = other DNA
ttcccaccccgcccctgtct

SEQ ID NO: 45493 - DNA, 20 bp, synthetic construct
  misc_feature 1..20: note = chemically synthesized
  source 1..20: mol_type = other DNA
tcccaccccgcccctgtctc

SEQ ID NO: 45494 - DNA, 20 bp, synthetic construct
  misc_feature 1..20: note = chemically synthesized
  source 1..20: mol_type = other DNA
caccccgcccctgtctcggg

SEQ ID NO: 45495 - DNA, 20 bp, synthetic construct
  misc_feature 1..20: note = chemically synthesized
  source 1..20: mol_type = other DNA
accccgcccctgtctcgggt

SEQ ID NO: 45496 - DNA, 20 bp, synthetic construct
  misc_feature 1..20: note = chemically synthesized
  source 1..20: mol_type = other DNA
ccccgcccctgtctcgggta

SEQ ID NO: 45497 - DNA, 20 bp, synthetic construct
  misc_feature 1..20: note = chemically synthesized
  source 1..20: mol_type = other DNA
ctcgggtagggccttctctc

SEQ ID NO: 45498 - DNA, 20 bp, synthetic construct
  misc_feature 1..20: note = chemically synthesized
  source 1..20: mol_type = other DNA
tcgggtagggccttctctcc

SEQ ID NO: 45499 - DNA, 20 bp, synthetic construct
  misc_feature 1..20: note = chemically synthesized
  source 1..20: mol_type = other DNA
ccatgttttccaaaccaaat

SEQ ID NO: 45500 - DNA, 20 bp, synthetic construct
  misc_feature 1..20: note = chemically synthesized
  source 1..20: mol_type = other DNA
caaatcggaacccactataa

SEQ ID NO: 45501 - DNA, 20 bp, synthetic construct
  misc_feature 1..20: note = chemically synthesized
  source 1..20: mol_type = other DNA
tcggaacccactataatggc

SEQ ID NO: 45502 - DNA, 20 bp, synthetic construct
  misc_feature 1..20: note = chemically synthesized
  source 1..20: mol_type = other DNA
aagcccgctttctctgtgcc

SEQ ID NO: 45503 - DNA, 20 bp, synthetic construct
  misc_feature 1..20: note = chemically synthesized
  source 1..20: mol_type = other DNA
cgctttctctgtgcctggtg

SEQ ID NO: 45504 - DNA, 20 bp, synthetic construct
  misc_feature 1..20: note = chemically synthesized
  source 1..20: mol_type = other DNA
tctgtgcctggtgcagttcc

SEQ ID NO: 45505 - DNA, 20 bp, synthetic construct
  misc_feature 1..20: note = chemically synthesized
  source 1..20: mol_type = other DNA
gtgcagttcccagtacgttc

SEQ ID NO: 45506 - DNA, 20 bp, synthetic construct
  misc_feature 1..20: note = chemically synthesized
  source 1..20: mol_type = other DNA
tgcagttcccagtacgttcc

SEQ ID NO: 45507 - DNA, 20 bp, synthetic construct
  misc_feature 1..20: note = chemically synthesized
  source 1..20: mol_type = other DNA
tccttcacccacctgtgccg

SEQ ID NO: 45508 - DNA, 20 bp, synthetic construct
  misc_feature 1..20: note = chemically synthesized
  source 1..20: mol_type = other DNA
tcacccacctgtgccgcggc

SEQ ID NO: 45509 - DNA, 20 bp, synthetic construct
  misc_feature 1..20: note = chemically synthesized
  source 1..20: mol_type = other DNA
cacccacctgtgccgcggcg

SEQ ID NO: 45510 - DNA, 20 bp, synthetic construct
  misc_feature 1..20: note = chemically synthesized
  source 1..20: mol_type = other DNA
ccacctgtgccgcggcgagg

SEQ ID NO: 45511 - DNA, 20 bp, synthetic construct
  misc_feature 1..20: note = chemically synthesized
  source 1..20: mol_type = other DNA
tgccgcggcgaggcagaaac

SEQ ID NO: 45512 - DNA, 20 bp, synthetic construct
  misc_feature 1..20: note = chemically synthesized
  source 1..20: mol_type = other DNA
gccgcggcgaggcagaaact

SEQ ID NO: 45513 - DNA, 20 bp, synthetic construct
  misc_feature 1..20: note = chemically synthesized
  source 1..20: mol_type = other DNA
gaggcagaaactgggaaatc

SEQ ID NO: 45514 - DNA, 20 bp, synthetic construct
  misc_feature 1..20: note = chemically synthesized
  source 1..20: mol_type = other DNA
aggcagaaactgggaaatct

SEQ ID NO: 45515 - DNA, 20 bp, synthetic construct
  misc_feature 1..20: note = chemically synthesized
  source 1..20: mol_type = other DNA
cagaaactgggaaatctggg

SEQ ID NO: 45516 - DNA, 20 bp, synthetic construct
  misc_feature 1..20: note = chemically synthesized
  source 1..20: mol_type = other DNA
agaaactgggaaatctgggc

SEQ ID NO: 45517 - DNA, 20 bp, synthetic construct
  misc_feature 1..20: note = chemically synthesized
  source 1..20: mol_type = other DNA
gaaatctgggcaggatatcc

SEQ ID NO: 45518 - DNA, 20 bp, synthetic construct
  misc_feature 1..20: note = chemically synthesized
  source 1..20: mol_type = other DNA
atctgggcaggatatcctgg

SEQ ID NO: 45519 - DNA, 20 bp, synthetic construct
  misc_feature 1..20: note = chemically synthesized
  source 1..20: mol_type = other DNA
gtgctctgctcgcccttcct

SEQ ID NO: 45520 - DNA, 20 bp, synthetic construct
  misc_feature 1..20: note = chemically synthesized
  source 1..20: mol_type = other DNA
gctcgcccttcctcggcctc

SEQ ID NO: 45521 - DNA, 20 bp, synthetic construct
  misc_feature 1..20: note = chemically synthesized
  source 1..20: mol_type = other DNA
ctcgcccttcctcggcctcc

SEQ ID NO: 45522 - DNA, 20 bp, synthetic construct
  misc_feature 1..20: note = chemically synthesized
  source 1..20: mol_type = other DNA
ccgcgaaccttcccactgaa

SEQ ID NO: 45523 - DNA, 20 bp, synthetic construct
  misc_feature 1..20: note = chemically synthesized
  source 1..20: mol_type = other DNA
aaccttcccactgaatagcg

SEQ ID NO: 45524 - DNA, 20 bp, synthetic construct
  misc_feature 1..20: note = chemically synthesized
  source 1..20: mol_type = other DNA
aatagcgcagccgcacgccc

SEQ ID NO: 45525 - DNA, 20 bp, synthetic construct
  misc_feature 1..20: note = chemically synthesized
  source 1..20: mol_type = other DNA
gcgcagccgcacgccccagc

SEQ ID NO: 45526 - DNA, 20 bp, synthetic construct
  misc_feature 1..20: note = chemically synthesized
  source 1..20: mol_type = other DNA
cacgccccagcaagtcccca

SEQ ID NO: 45527 - DNA, 20 bp, synthetic construct
  misc_feature 1..20: note = chemically synthesized
  source 1..20: mol_type = other DNA
cgccccagcaagtccccaaa

SEQ ID NO: 45528 - DNA, 20 bp, synthetic construct
  misc_feature 1..20: note = chemically synthesized
  source 1..20: mol_type = other DNA
ccagcaagtccccaaagagc

SEQ ID NO: 45529 - DNA, 20 bp, synthetic construct
  misc_feature 1..20: note = chemically synthesized
  source 1..20: mol_type = other DNA
ctcccccgccgccttgcctg

SEQ ID NO: 45530 - DNA, 20 bp, synthetic construct
  misc_feature 1..20: note = chemically synthesized
  source 1..20: mol_type = other DNA
ccgccttgcctgcagtcccc

SEQ ID NO: 45531 - DNA, 20 bp, synthetic construct
  misc_feature 1..20: note = chemically synthesized
  source 1..20: mol_type = other DNA
gcagtccccaagatcgtgcc

SEQ ID NO: 45532 - DNA, 20 bp, synthetic construct
  misc_feature 1..20: note = chemically synthesized
  source 1..20: mol_type = other DNA
ccccaagatcgtgccaagcg

SEQ ID NO: 45533 - DNA, 20 bp, synthetic construct
  misc_feature 1..20: note = chemically synthesized
  source 1..20: mol_type = other DNA
ccaagatcgtgccaagcgaa

SEQ ID NO: 45534 - DNA, 20 bp, synthetic construct
  misc_feature 1..20: note = chemically synthesized
  source 1..20: mol_type = other DNA
cgtgccaagcgaagagccct

SEQ ID NO: 45535 - DNA, 20 bp, synthetic construct
  misc_feature 1..20: note = chemically synthesized
  source 1..20: mol_type = other DNA
actccacttcctctcttaca

SEQ ID NO: 45536 - DNA, 20 bp, synthetic construct
  misc_feature 1..20: note = chemically synthesized
  source 1..20: mol_type = other DNA
ctccacttcctctcttacat

SEQ ID NO: 45537 - DNA, 20 bp, synthetic construct
  misc_feature 1..20: note = chemically synthesized
  source 1..20: mol_type = other DNA
tccacttcctctcttacatg

SEQ ID NO: 45538 - DNA, 20 bp, synthetic construct
  misc_feature 1..20: note = chemically synthesized
  source 1..20: mol_type = other DNA
ccacttcctctcttacatgg

SEQ ID NO: 45539 - DNA, 20 bp, synthetic construct
  misc_feature 1..20: note = chemically synthesized
  source 1..20: mol_type = other DNA
cacttcctctcttacatggg

SEQ ID NO: 45540 - DNA, 20 bp, synthetic construct
  misc_feature 1..20: note = chemically synthesized
  source 1..20: mol_type = other DNA
ctcttacatggggggaaact

SEQ ID NO: 45541 - DNA, 20 bp, synthetic construct
  misc_feature 1..20: note = chemically synthesized
  source 1..20: mol_type = other DNA
tcttacatggggggaaactg

SEQ ID NO: 45542 - DNA, 20 bp, synthetic construct
  misc_feature 1..20: note = chemically synthesized
  source 1..20: mol_type = other DNA
atggggggaaactgaggccc

SEQ ID NO: 45543 - DNA, 20 bp, synthetic construct
  misc_feature 1..20: note = chemically synthesized
  source 1..20: mol_type = other DNA
ggggggaaactgaggcccga

SEQ ID NO: 45544 - DNA, 20 bp, synthetic construct
  misc_feature 1..20: note = chemically synthesized
  source 1..20: mol_type = other DNA
gggggaaactgaggcccgag

SEQ ID NO: 45545 - DNA, 20 bp, synthetic construct
  misc_feature 1..20: note = chemically synthesized
  source 1..20: mol_type = other DNA
aactgaggcccgagaggaaa

SEQ ID NO: 45546 - DNA, 20 bp, synthetic construct
  misc_feature 1..20: note = chemically synthesized
  source 1..20: mol_type = other DNA
gaaacagcaccgcaccgtcc

SEQ ID NO: 45547 - DNA, 20 bp, synthetic construct
  misc_feature 1..20: note = chemically synthesized
  source 1..20: mol_type = other DNA
gcaccgcaccgtcccggctg

SEQ ID NO: 45548 - DNA, 20 bp, synthetic construct
  misc_feature 1..20: note = chemically synthesized
  source 1..20: mol_type = other DNA
caccgcaccgtcccggctgc

SEQ ID NO: 45549 - DNA, 20 bp, synthetic construct
  misc_feature 1..20: note = chemically synthesized
  source 1..20: mol_type = other DNA
tcccggctgcgggttcgccc

SEQ ID NO: 45550 - DNA, 20 bp, synthetic construct
  misc_feature 1..20: note = chemically synthesized
  source 1..20: mol_type = other DNA
ccatccctacacccgcacct

SEQ ID NO: 45551 - DNA, 20 bp, synthetic construct
  misc_feature 1..20: note = chemically synthesized
  source 1..20: mol_type = other DNA
cctacacccgcaccttggcg

SEQ ID NO: 45552 - DNA, 20 bp, synthetic construct
  misc_feature 1..20: note = chemically synthesized
  source 1..20: mol_type = other DNA
acacccgcaccttggcgcag

SEQ ID NO: 45553 - DNA, 20 bp, synthetic construct
  misc_feature 1..20: note = chemically synthesized
  source 1..20: mol_type = other DNA
cccgcaccttggcgcagcgg

SEQ ID NO: 45554 - DNA, 20 bp, synthetic construct
  misc_feature 1..20: note = chemically synthesized
  source 1..20: mol_type = other DNA
gcaccttggcgcagcggtgg

SEQ ID NO: 45555 - DNA, 20 bp, synthetic construct
  misc_feature 1..20: note = chemically synthesized
  source 1..20: mol_type = other DNA
caccttggcgcagcggtgga

SEQ ID NO: 45556 - DNA, 20 bp, synthetic construct
  misc_feature 1..20: note = chemically synthesized
  source 1..20: mol_type = other DNA
cttggcgcagcggtggaagg

SEQ ID NO: 45557 - DNA, 20 bp, synthetic construct
  misc_feature 1..20: note = chemically synthesized
  source 1..20: mol_type = other DNA
gcagcggtggaaggtggctg

SEQ ID NO: 45558 - DNA, 20 bp, synthetic construct
  misc_feature 1..20: note = chemically synthesized
  source 1..20: mol_type = other DNA
ggtggctgtggttccgtgct

SEQ ID NO: 45559 - DNA, 20 bp, synthetic construct
  misc_feature 1..20: note = chemically synthesized
  source 1..20: mol_type = other DNA
gtggctgtggttccgtgctc

SEQ ID NO: 45560 - DNA, 20 bp, synthetic construct
  misc_feature 1..20: note = chemically synthesized
  source 1..20: mol_type = other DNA
ggttccgtgctcgggtgctt

SEQ ID NO: 45561 - DNA, 20 bp, synthetic construct
  misc_feature 1..20: note = chemically synthesized
  source 1..20: mol_type = other DNA
ccgtgctcgggtgcttcggc

SEQ ID NO: 45562 - DNA, 20 bp, synthetic construct
  misc_feature 1..20: note = chemically synthesized
  source 1..20: mol_type = other DNA
cgtgctcgggtgcttcggcc

SEQ ID NO: 45563 - DNA, 20 bp, synthetic construct
  misc_feature 1..20: note = chemically synthesized
  source 1..20: mol_type = other DNA
ttcggccaggccgtcctcct

SEQ ID NO: 45564 - DNA, 20 bp, synthetic construct
  misc_feature 1..20: note = chemically synthesized
  source 1..20: mol_type = other DNA
ggccgtcctcctcggaacgc

SEQ ID NO: 45565 - DNA, 20 bp, synthetic construct
  misc_feature 1..20: note = chemically synthesized
  source 1..20: mol_type = other DNA
gccgtcctcctcggaacgca

SEQ ID NO: 45566 - DNA, 20 bp, synthetic construct
  misc_feature 1..20: note = chemically synthesized
  source 1..20: mol_type = other DNA
tcctcctcggaacgcaaggc

SEQ ID NO: 45567 - DNA, 20 bp, synthetic construct
  misc_feature 1..20: note = chemically synthesized
  source 1..20: mol_type = other DNA
tcggaacgcaaggctagcac

SEQ ID NO: 45568 - DNA, 20 bp, synthetic construct
  misc_feature 1..20: note = chemically synthesized
  source 1..20: mol_type = other DNA
aggctagcaccagctcctcg

SEQ ID NO: 45569 - DNA, 20 bp, synthetic construct
  misc_feature 1..20: note = chemically synthesized
  source 1..20: mol_type = other DNA
cgtcctcgtcctcctgcgca

SEQ ID NO: 45570 - DNA, 20 bp, synthetic construct
  misc_feature 1..20: note = chemically synthesized
  source 1..20: mol_type = other DNA
gtcctcgtcctcctgcgcac

SEQ ID NO: 45571 - DNA, 20 bp, synthetic construct
  misc_feature 1..20: note = chemically synthesized
  source 1..20: mol_type = other DNA
ctcctgcgcacgggcgcccg

SEQ ID NO: 45572 - DNA, 20 bp, synthetic construct
  misc_feature 1..20: note = chemically synthesized
  source 1..20: mol_type = other DNA
tcctgcgcacgggcgcccgc

SEQ ID NO: 45573 - DNA, 20 bp, synthetic construct
  misc_feature 1..20: note = chemically synthesized
  source 1..20: mol_type = other DNA
gcacgggcgcccgcgggacc

SEQ ID NO: 45574 - DNA, 20 bp, synthetic construct
  misc_feature 1..20: note = chemically synthesized
  source 1..20: mol_type = other DNA
cacgggcgcccgcgggaccc

SEQ ID NO: 45575 - DNA, 20 bp, synthetic construct
  misc_feature 1..20: note = chemically synthesized
  source 1..20: mol_type = other DNA
cgggcgcccgcgggacccag

SEQ ID NO: 45576 - DNA, 20 bp, synthetic construct
  misc_feature 1..20: note = chemically synthesized
  source 1..20: mol_type = other DNA
gcgcccgcgggacccaggag

SEQ ID NO: 45577 - DNA, 20 bp, synthetic construct
  misc_feature 1..20: note = chemically synthesized
  source 1..20: mol_type = other DNA
cccgcgggacccaggagcag

SEQ ID NO: 45578 - DNA, 20 bp, synthetic construct
  misc_feature 1..20: note = chemically synthesized
  source 1..20: mol_type = other DNA
gcgggacccaggagcagcag

SEQ ID NO: 45579 - DNA, 20 bp, synthetic construct
  misc_feature 1..20: note = chemically synthesized
  source 1..20: mol_type = other DNA
ggacccaggagcagcagcag

SEQ ID NO: 45580 - DNA, 20 bp, synthetic construct
  misc_feature 1..20: note = chemically synthesized
  source 1..20: mol_type = other DNA
cccaggagcagcagcagcag

SEQ ID NO: 45581 - DNA, 20 bp, synthetic construct
  misc_feature 1..20: note = chemically synthesized
  source 1..20: mol_type = other DNA
aggagcagcagcagcagcag

SEQ ID NO: 45582 - DNA, 20 bp, synthetic construct
  misc_feature 1..20: note = chemically synthesized
  source 1..20: mol_type = other DNA
agcagcagcagcagcagcag

SEQ ID NO: 45583 - DNA, 20 bp, synthetic construct
  misc_feature 1..20: note = chemically synthesized
  source 1..20: mol_type = other DNA
agcagcagcagcagcagcag

SEQ ID NO: 45584 - DNA, 20 bp, synthetic construct
  misc_feature 1..20: note = chemically synthesized
  source 1..20: mol_type = other DNA
agcagcagcagcagcagtgg

SEQ ID NO: 45585 - DNA, 20 bp, synthetic construct
  misc_feature 1..20: note = chemically synthesized
  source 1..20: mol_type = other DNA
agcagcagcagcagtggcag

SEQ ID NO: 45586 - DNA, 20 bp, synthetic construct
  misc_feature 1..20: note = chemically synthesized
  source 1..20: mol_type = other DNA
gcagcagtggcagcggccac

SEQ ID NO: 45587 - DNA, 20 bp, synthetic construct
  misc_feature 1..20: note = chemically synthesized
  source 1..20: mol_type = other DNA
cagcagtggcagcggccacc

SEQ ID NO: 45588 - DNA, 20 bp, synthetic construct
  misc_feature 1..20: note = chemically synthesized
  source 1..20: mol_type = other DNA
cagcggccaccaggaccgcc

SEQ ID NO: 45589 - DNA, 20 bp, synthetic construct
  misc_feature 1..20: note = chemically synthesized
  source 1..20: mol_type = other DNA
gcggccaccaggaccgcctg

SEQ ID NO: 45590 - DNA, 20 bp, synthetic construct
  misc_feature 1..20: note = chemically synthesized
  source 1..20: mol_type = other DNA
ccaggaccgcctggagctga

SEQ ID NO: 45591 - DNA, 20 bp, synthetic construct
  misc_feature 1..20: note = chemically synthesized
  source 1..20: mol_type = other DNA
ctggagctgacggtgcccat

SEQ ID NO: 45592 - DNA, 20 bp, synthetic construct
  misc_feature 1..20: note = chemically synthesized
  source 1..20: mol_type = other DNA
tggagctgacggtgcccatg

SEQ ID NO: 45593 - DNA, 20 bp, synthetic construct
  misc_feature 1..20: note = chemically synthesized
  source 1..20: mol_type = other DNA
ggagctgacggtgcccatga

SEQ ID NO: 45594 - DNA, 20 bp, synthetic construct
  misc_feature 1..20: note = chemically synthesized
  source 1..20: mol_type = other DNA
ctgacggtgcccatgagggc

SEQ ID NO: 45595 - DNA, 20 bp, synthetic construct
  misc_feature 1..20: note = chemically synthesized
  source 1..20: mol_type = other DNA
tgacggtgcccatgagggcc

SEQ ID NO: 45596 - DNA, 20 bp, synthetic construct
  misc_feature 1..20: note = chemically synthesized
  source 1..20: mol_type = other DNA
gacggtgcccatgagggcca

SEQ ID NO: 45597 - DNA, 20 bp, synthetic construct
  misc_feature 1..20: note = chemically synthesized
  source 1..20: mol_type = other DNA
acggtgcccatgagggccag

SEQ ID NO: 45598 - DNA, 20 bp, synthetic construct
  misc_feature 1..20: note = chemically synthesized
  source 1..20: mol_type = other DNA
ggtgcccatgagggccaggg

SEQ ID NO: 45599 - DNA, 20 bp, synthetic construct
  misc_feature 1..20: note = chemically synthesized
  source 1..20: mol_type = other DNA
tgcccatgagggccagggga

SEQ ID NO: 45600 - DNA, 20 bp, synthetic construct
  misc_feature 1..20: note = chemically synthesized
  source 1..20: mol_type = other DNA
gcccatgagggccaggggag

SEQ ID NO: 45601 - DNA, 20 bp, synthetic construct
  misc_feature 1..20: note = chemically synthesized
  source 1..20: mol_type = other DNA
caggggagaggttgctgtcc

SEQ ID NO: 45602 - DNA, 20 bp, synthetic construct
  misc_feature 1..20: note = chemically synthesized
  source 1..20: mol_type = other DNA
ggagaggttgctgtcctggc

SEQ ID NO: 45603 - DNA, 20 bp, synthetic construct
  misc_feature 1..20: note = chemically synthesized
  source 1..20: mol_type = other DNA
gagaggttgctgtcctggcg

SEQ ID NO: 45604 - DNA, 20 bp, synthetic construct
  misc_feature 1..20: note = chemically synthesized
  source 1..20: mol_type = other DNA
gaggttgctgtcctggcgag

SEQ ID NO: 45605 - DNA, 20 bp, synthetic construct
  misc_feature 1..20: note = chemically synthesized
  source 1..20: mol_type = other DNA
gctgtcctggcgaggagacc

SEQ ID NO: 45606 - DNA, 20 bp, synthetic construct
  misc_feature 1..20: note = chemically synthesized
  source 1..20: mol_type = other DNA
tgtcctggcgaggagaccta

SEQ ID NO: 45607 - DNA, 20 bp, synthetic construct
  misc_feature 1..20: note = chemically synthesized
  source 1..20: mol_type = other DNA
gtcctggcgaggagacctag

SEQ ID NO: 45608 - DNA, 20 bp, synthetic construct
  misc_feature 1..20: note = chemically synthesized
  source 1..20: mol_type = other DNA
ggagacctagaggccgtgcg

SEQ ID NO: 45609 - DNA, 20 bp, synthetic construct
  misc_feature 1..20: note = chemically synthesized
  source 1..20: mol_type = other DNA
aggccgtgcgcggtccacgc

SEQ ID NO: 45610 - DNA, 20 bp, synthetic construct
  misc_feature 1..20: note = chemically synthesized
  source 1..20: mol_type = other DNA
ccgtgcgcggtccacgccgg

SEQ ID NO: 45611 - DNA, 20 bp, synthetic construct
  misc_feature 1..20: note = chemically synthesized
  source 1..20: mol_type = other DNA
gtccacgccggcggcgcctt

SEQ ID NO: 45612 - DNA, 20 bp, synthetic construct
  misc_feature 1..20: note = chemically synthesized
  source 1..20: mol_type = other DNA
cggcggcgccttgagccttg

SEQ ID NO: 45613 - DNA, 20 bp, synthetic construct
  misc_feature 1..20: note = chemically synthesized
  source 1..20: mol_type = other DNA
cggcgccttgagccttgcgg

SEQ ID NO: 45614 - DNA, 20 bp, synthetic construct
  misc_feature 1..20: note = chemically synthesized
  source 1..20: mol_type = other DNA
ggcgccttgagccttgcggt

SEQ ID NO: 45615 - DNA, 20 bp, synthetic construct
  misc_feature 1..20: note = chemically synthesized
  source 1..20: mol_type = other DNA
gcgccttgagccttgcggtg

SEQ ID NO: 45616 - DNA, 20 bp, synthetic construct
  misc_feature 1..20: note = chemically synthesized
  source 1..20: mol_type = other DNA
gccttgagccttgcggtggg

SEQ ID NO: 45617 - DNA, 20 bp, synthetic construct
  misc_feature 1..20: note = chemically synthesized
  source 1..20: mol_type = other DNA
ccttgagccttgcggtgggg

SEQ ID NO: 45618 - DNA, 20 bp, synthetic construct
  misc_feature 1..20: note = chemically synthesized
  source 1..20: mol_type = other DNA
ttgcggtggggaggactgtg

SEQ ID NO: 45619 - DNA, 20 bp, synthetic construct
  misc_feature 1..20: note = chemically synthesized
  source 1..20: mol_type = other DNA
tgcggtggggaggactgtgc

SEQ ID NO: 45620 - DNA, 20 bp, synthetic construct
  misc_feature 1..20: note = chemically synthesized
  source 1..20: mol_type = other DNA
cggtggggaggactgtgcag

SEQ ID NO: 45621 - DNA, 20 bp, synthetic construct
  misc_feature 1..20: note = chemically synthesized
  source 1..20: mol_type = other DNA
ggaggactgtgcaggagctg

SEQ ID NO: 45622 - DNA, 20 bp, synthetic construct
  misc_feature 1..20: note = chemically synthesized
  source 1..20: mol_type = other DNA
actgtgcaggagctgaagtt

SEQ ID NO: 45623 - DNA, 20 bp, synthetic construct
  misc_feature 1..20: note = chemically synthesized
  source 1..20: mol_type = other DNA
ctgtgcaggagctgaagttc

SEQ ID NO: 45624 - DNA, 20 bp, synthetic construct
  misc_feature 1..20: note = chemically synthesized
  source 1..20: mol_type = other DNA
gtgcaggagctgaagttcag

SEQ ID NO: 45625 - DNA, 20 bp, synthetic construct
  misc_feature 1..20: note = chemically synthesized
  source 1..20: mol_type = other DNA
caggagctgaagttcaggag

SEQ ID NO: 45626 - DNA, 20 bp, synthetic construct
  misc_feature 1..20: note = chemically synthesized
  source 1..20: mol_type = other DNA
aggagctgaagttcaggagc

SEQ ID NO: 45627 - DNA, 20 bp, synthetic construct
  misc_feature 1..20: note = chemically synthesized
  source 1..20: mol_type = other DNA
ggagctgaagttcaggagca

SEQ ID NO: 45628 - DNA, 20 bp, synthetic construct
  misc_feature 1..20: note = chemically synthesized
  source 1..20: mol_type = other DNA
gttcaggagcagggcgcgtg

SEQ ID NO: 45629 - DNA, 20 bp, synthetic construct
  misc_feature 1..20: note = chemically synthesized
  source 1..20: mol_type = other DNA
ttcaggagcagggcgcgtga

SEQ ID NO: 45630 - DNA, 20 bp, synthetic construct
  misc_feature 1..20: note = chemically synthesized
  source 1..20: mol_type = other DNA
tcaggagcagggcgcgtgaa

SEQ ID NO: 45631 - DNA, 20 bp, synthetic construct
  misc_feature 1..20: note = chemically synthesized
  source 1..20: mol_type = other DNA
caggagcagggcgcgtgaag

SEQ ID NO: 45632 - DNA, 20 bp, synthetic construct
  misc_feature 1..20: note = chemically synthesized
  source 1..20: mol_type = other DNA
agggcgcgtgaaggggcgcg

SEQ ID NO: 45633 - DNA, 20 bp, synthetic construct
  misc_feature 1..20: note = chemically synthesized
  source 1..20: mol_type = other DNA
tgaaggggcgcgcggaatcc

SEQ ID NO: 45634 - DNA, 20 bp, synthetic construct
  misc_feature 1..20: note = chemically synthesized
  source 1..20: mol_type = other DNA
ggggcgcgcggaatcctggc

SEQ ID NO: 45635 - DNA, 20 bp, synthetic construct
  misc_feature 1..20: note = chemically synthesized
  source 1..20: mol_type = other DNA
gggcgcgcggaatcctggct

SEQ ID NO: 45636 - DNA, 20 bp, synthetic construct
  misc_feature 1..20: note = chemically synthesized
  source 1..20: mol_type = other DNA
gcgcgcggaatcctggctgg

SEQ ID NO: 45637 - DNA, 20 bp, synthetic construct
  misc_feature 1..20: note = chemically synthesized
  source 1..20: mol_type = other DNA
gcggaatcctggctgggagc

SEQ ID NO: 45638 - DNA, 20 bp, synthetic construct
  misc_feature 1..20: note = chemically synthesized
  source 1..20: mol_type = other DNA
cggaatcctggctgggagct

SEQ ID NO: 45639 - DNA, 20 bp, synthetic construct
  misc_feature 1..20: note = chemically synthesized
  source 1..20: mol_type = other DNA
gaatcctggctgggagctgg

SEQ ID NO: 45640 - DNA, 20 bp, synthetic construct
  misc_feature 1..20: note = chemically synthesized
  source 1..20: mol_type = other DNA
gctgctgcaacgacgcgtcc

SEQ ID NO: 45641 - DNA, 20 bp, synthetic construct
  misc_feature 1..20: note = chemically synthesized
  source 1..20: mol_type = other DNA
cgacgcgtcccggcccgccc

SEQ ID NO: 45642 - DNA, 20 bp, synthetic construct
  misc_feature 1..20: note = chemically synthesized
  source 1..20: mol_type = other DNA
gcgtcccggcccgcccgagc

SEQ ID NO: 45643 - DNA, 20 bp, synthetic construct
  misc_feature 1..20: note = chemically synthesized
  source 1..20: mol_type = other DNA
cccgagccagtctcactgcc

SEQ ID NO: 45644 - DNA, 20 bp, synthetic construct
  misc_feature 1..20: note = chemically synthesized
  source 1..20: mol_type = other DNA
cactgcctggctcactcctc

SEQ ID NO: 45645 - DNA, 20 bp, synthetic construct
  misc_feature 1..20: note = chemically synthesized
  source 1..20: mol_type = other DNA
actgcctggctcactcctcc

SEQ ID NO: 45646 - DNA, 20 bp, synthetic construct
  misc_feature 1..20: note = chemically synthesized
  source 1..20: mol_type = other DNA
ctggctcactcctccaggct

SEQ ID NO: 45647 - DNA, 20 bp, synthetic construct
  misc_feature 1..20: note = chemically synthesized
  source 1..20: mol_type = other DNA
ggctcagaccctgaactgaa

SEQ ID NO: 45648 - DNA, 20 bp, synthetic construct
  misc_feature 1..20: note = chemically synthesized
  source 1..20: mol_type = other DNA
tcagaccctgaactgaacgg

SEQ ID NO: 45649 - DNA, 20 bp, synthetic construct
  misc_feature 1..20: note = chemically synthesized
  source 1..20: mol_type = other DNA
cggcgcccgcctgcaaccat

SEQ ID NO: 45650 - DNA, 20 bp, synthetic construct
  misc_feature 1..20: note = chemically synthesized
  source 1..20: mol_type = other DNA
tgagcgcctcgacgtcgctg

SEQ ID NO: 45651 - DNA, 20 bp, synthetic construct
  misc_feature 1..20: note = chemically synthesized
  source 1..20: mol_type = other DNA
acgtcgctgcggaaaccttc

SEQ ID NO: 45652 - DNA, 20 bp, synthetic construct
  misc_feature 1..20: note = chemically synthesized
  source 1..20: mol_type = other DNA
cgtcgctgcggaaaccttct

SEQ ID NO: 45653 - DNA, 20 bp, synthetic construct
  misc_feature 1..20: note = chemically synthesized
  source 1..20: mol_type = other DNA
gtcgctgcggaaaccttcta

SEQ ID NO: 45654 - DNA, 20 bp, synthetic construct
  misc_feature 1..20: note = chemically synthesized
  source 1..20: mol_type = other DNA
tgcggaaaccttctagggtg

SEQ ID NO: 45655 - DNA, 20 bp, synthetic construct
  misc_feature 1..20: note = chemically synthesized
  source 1..20: mol_type = other DNA
gcggaaaccttctagggtgt

SEQ ID NO: 45656 - DNA, 20 bp, synthetic construct
  misc_feature 1..20: note = chemically synthesized
  source 1..20: mol_type = other DNA
gggtgtgggtgcttgacgcc

SEQ ID NO: 45657 - DNA, 20 bp, synthetic construct
  misc_feature 1..20: note = chemically synthesized
  source 1..20: mol_type = other DNA
ggtgtgggtgcttgacgcct

SEQ ID NO: 45658 - DNA, 20 bp, synthetic construct
  misc_feature 1..20: note = chemically synthesized
  source 1..20: mol_type = other DNA
gtgtgggtgcttgacgcctg

SEQ ID NO: 45659 - DNA, 20 bp, synthetic construct
  misc_feature 1..20: note = chemically synthesized
  source 1..20: mol_type = other DNA
tgcttgacgcctggggcgcg

SEQ ID NO: 45660 - DNA, 20 bp, synthetic construct
  misc_feature 1..20: note = chemically synthesized
  source 1..20: mol_type = other DNA
gggcgcgcagatcacgccac

SEQ ID NO: 45661 - DNA, 20 bp, synthetic construct
  misc_feature 1..20: note = chemically synthesized
  source 1..20: mol_type = other DNA
gcgcgcagatcacgccacca

SEQ ID NO: 45662 - DNA, 20 bp, synthetic construct
  misc_feature 1..20: note = chemically synthesized
  source 1..20: mol_type = other DNA
tcacgccaccagagccccat

SEQ ID NO: 45663 - DNA, 20 bp, synthetic construct
  misc_feature 1..20: note = chemically synthesized
  source 1..20: mol_type = other DNA
cctatctgattaaacattaa

SEQ ID NO: 45664 - DNA, 20 bp, synthetic construct
  misc_feature 1..20: note = chemically synthesized
  source 1..20: mol_type = other DNA
ttaaacattaacggaacccc

SEQ ID NO: 45665 - DNA, 20 bp, synthetic construct
  misc_feature 1..20: note = chemically synthesized
  source 1..20: mol_type = other DNA
cattaacggaacccccggac

SEQ ID NO: 45666 - DNA, 20 bp, synthetic construct
  misc_feature 1..20: note = chemically synthesized
  source 1..20: mol_type = other DNA
ttaacggaacccccggactg

SEQ ID NO: 45667 - DNA, 20 bp, synthetic construct
  misc_feature 1..20: note = chemically synthesized
  source 1..20: mol_type = other DNA
taacggaacccccggactgg

SEQ ID NO: 45668 - DNA, 20 bp, synthetic construct
  misc_feature 1..20: note = chemically synthesized
  source 1..20: mol_type = other DNA
gaacccccggactggaggat

SEQ ID NO: 45669 - DNA, 20 bp, synthetic construct
  misc_feature 1..20: note = chemically synthesized
  source 1..20: mol_type = other DNA
aacccccggactggaggatc

SEQ ID NO: 45670 - DNA, 20 bp, synthetic construct
  misc_feature 1..20: note = chemically synthesized
  source 1..20: mol_type = other DNA
cggactggaggatcaggttt

SEQ ID NO: 45671 - DNA, 20 bp, synthetic construct
  misc_feature 1..20: note = chemically synthesized
  source 1..20: mol_type = other DNA
tcggcctcgccctccccaaa

SEQ ID NO: 45672 - DNA, 20 bp, synthetic construct
  misc_feature 1..20: note = chemically synthesized
  source 1..20: mol_type = other DNA
tcgccctccccaaacagcgt

SEQ ID NO: 45673 - DNA, 20 bp, synthetic construct
  misc_feature 1..20: note = chemically synthesized
  source 1..20: mol_type = other DNA
aaacagcgtcagattacgcg

SEQ ID NO: 45674 - DNA, 20 bp, synthetic construct
  misc_feature 1..20: note = chemically synthesized
  source 1..20: mol_type = other DNA
acagcgtcagattacgcgca

SEQ ID NO: 45675 - DNA, 20 bp, synthetic construct
  misc_feature 1..20: note = chemically synthesized
  source 1..20: mol_type = other DNA
cagcgtcagattacgcgcag

SEQ ID NO: 45676 - DNA, 20 bp, synthetic construct
  misc_feature 1..20: note = chemically synthesized
  source 1..20: mol_type = other DNA
agcgtcagattacgcgcaga

SEQ ID NO: 45677 - DNA, 20 bp, synthetic construct
  misc_feature 1..20: note = chemically synthesized
  source 1..20: mol_type = other DNA
gtcagattacgcgcagaggg

SEQ ID NO: 45678 - DNA, 20 bp, synthetic construct
  misc_feature 1..20: note = chemically synthesized
  source 1..20: mol_type = other DNA
aaaaactcccaaatcctaac

SEQ ID NO: 45679 - DNA, 20 bp, synthetic construct
  misc_feature 1..20: note = chemically synthesized
  source 1..20: mol_type = other DNA
aaaactcccaaatcctaact

SEQ ID NO: 45680 - DNA, 20 bp, synthetic construct
  misc_feature 1..20: note = chemically synthesized
  source 1..20: mol_type = other DNA
ctcccaaatcctaactgggc

SEQ ID NO: 45681 - DNA, 20 bp, synthetic construct
  misc_feature 1..20: note = chemically synthesized
  source 1..20: mol_type = other DNA
ccaaatcctaactgggctgg

SEQ ID NO: 45682 - DNA, 20 bp, synthetic construct
  misc_feature 1..20: note = chemically synthesized
  source 1..20: mol_type = other DNA
caaatcctaactgggctgga

SEQ ID NO: 45683 - DNA, 20 bp, synthetic construct
  misc_feature 1..20: note = chemically synthesized
  source 1..20: mol_type = other DNA
atcctaactgggctggaagg

SEQ ID NO: 45684 - DNA, 20 bp, synthetic construct
  misc_feature 1..20: note = chemically synthesized
  source 1..20: mol_type = other DNA
tcctaactgggctggaaggc

SEQ ID NO: 45685 - DNA, 20 bp, synthetic construct
  misc_feature 1..20: note = chemically synthesized
  source 1..20: mol_type = other DNA
aactgggctggaaggcaggc

SEQ ID NO: 45686 - DNA, 20 bp, synthetic construct
  misc_feature 1..20: note = chemically synthesized
  source 1..20: mol_type = other DNA
tggaaggcaggccggcgccc

SEQ ID NO: 45687 - DNA, 20 bp, synthetic construct
  misc_feature 1..20: note = chemically synthesized
  source 1..20: mol_type = other DNA
ggaaggcaggccggcgccct

SEQ ID NO: 45688 - DNA, 20 bp, synthetic construct
  misc_feature 1..20: note = chemically synthesized
  source 1..20: mol_type = other DNA
gaaggcaggccggcgcccta

SEQ ID NO: 45689 - DNA, 20 bp, synthetic construct
  misc_feature 1..20: note = chemically synthesized
  source 1..20: mol_type = other DNA
aaggcaggccggcgccctag

SEQ ID NO: 45690 - DNA, 20 bp, synthetic construct
  misc_feature 1..20: note = chemically synthesized
  source 1..20: mol_type = other DNA
ctcccgcctctcaccctgcg

SEQ ID NO: 45691 - DNA, 20 bp, synthetic construct
  misc_feature 1..20: note = chemically synthesized
  source 1..20: mol_type = other DNA
tcccgcctctcaccctgcgt

SEQ ID NO: 45692 - DNA, 20 bp, synthetic construct
  misc_feature 1..20: note = chemically synthesized
  source 1..20: mol_type = other DNA
tctcaccctgcgtgggatgc

SEQ ID NO: 45693 - DNA, 20 bp, synthetic construct
  misc_feature 1..20: note = chemically synthesized
  source 1..20: mol_type = other DNA
tgcgtgggatgccagactcc

SEQ ID NO: 45694 - DNA, 20 bp, synthetic construct
  misc_feature 1..20: note = chemically synthesized
  source 1..20: mol_type = other DNA
tgccagactccaagttctgc

SEQ ID NO: 45695 - DNA, 20 bp, synthetic construct
  misc_feature 1..20: note = chemically synthesized
  source 1..20: mol_type = other DNA
gccagactccaagttctgcc

SEQ ID NO: 45696 - DNA, 20 bp, synthetic construct
  misc_feature 1..20: note = chemically synthesized
  source 1..20: mol_type = other DNA
ttctgccgggcccacctttt

SEQ ID NO: 45697 - DNA, 20 bp, synthetic construct
  misc_feature 1..20: note = chemically synthesized
  source 1..20: mol_type = other DNA
cccaccttttcagtgtttcc

SEQ ID NO: 45698 - DNA, 20 bp, synthetic construct
  misc_feature 1..20: note = chemically synthesized
  source 1..20: mol_type = other DNA
ccaccttttcagtgtttcct

SEQ ID NO: 45699 - DNA, 20 bp, synthetic construct
  misc_feature 1..20: note = chemically synthesized
  source 1..20: mol_type = other DNA
ccaccttgtctcctgctgac

SEQ ID NO: 45700 - DNA, 20 bp, synthetic construct
  misc_feature 1..20: note = chemically synthesized
  source 1..20: mol_type = other DNA
cttgtctcctgctgaccagt

SEQ ID NO: 45701 - DNA, 20 bp, synthetic construct
  misc_feature 1..20: note = chemically synthesized
  source 1..20: mol_type = other DNA
cttctgaatcaatcctactg

SEQ ID NO: 45702 - DNA, 20 bp, synthetic construct
  misc_feature 1..20: note = chemically synthesized
  source 1..20: mol_type = other DNA
gcccaccgaattctttccac

SEQ ID NO: 45703 - DNA, 20 bp, synthetic construct
  misc_feature 1..20: note = chemically synthesized
  source 1..20: mol_type = other DNA
tctttccactggccttaacc

SEQ ID NO: 45704 - DNA, 20 bp, synthetic construct
  misc_feature 1..20: note = chemically synthesized
  source 1..20: mol_type = other DNA
ttccactggccttaacctgg

SEQ ID NO: 45705 - DNA, 20 bp, synthetic construct
  misc_feature 1..20: note = chemically synthesized
  source 1..20: mol_type = other DNA
acctggcagccttctaaact

SEQ ID NO: 45706 - DNA, 20 bp, synthetic construct
  misc_feature 1..20: note = chemically synthesized
  source 1..20: mol_type = other DNA
gcagccttctaaacttagcc

SEQ ID NO: 45707 - DNA, 20 bp, synthetic construct
  misc_feature 1..20: note = chemically synthesized
  source 1..20: mol_type = other DNA
aacttagcctggaccccctc

SEQ ID NO: 45708 - DNA, 20 bp, synthetic construct
  misc_feature 1..20: note = chemically synthesized
  source 1..20: mol_type = other DNA
tgcacactgaccttaccaac

SEQ ID NO: 45709 - DNA, 20 bp, synthetic construct
  misc_feature 1..20: note = chemically synthesized
  source 1..20: mol_type = other DNA
taccaactagctgctccttg

SEQ ID NO: 45710 - DNA, 20 bp, synthetic construct
  misc_feature 1..20: note = chemically synthesized
  source 1..20: mol_type = other DNA
ccaactagctgctccttgaa

SEQ ID NO: 45711 - DNA, 20 bp, synthetic construct
  misc_feature 1..20: note = chemically synthesized
  source 1..20: mol_type = other DNA
gattgcttgcttttgatgtc

SEQ ID NO: 45712 - DNA, 20 bp, synthetic construct
  misc_feature 1..20: note = chemically synthesized
  source 1..20: mol_type = other DNA
gtccagcctacatgcatttc

SEQ ID NO: 45713 - DNA, 20 bp, synthetic construct
  misc_feature 1..20: note = chemically synthesized
  source 1..20: mol_type = other DNA
tccagcctacatgcatttca

SEQ ID NO: 45714 - DNA, 20 bp, synthetic construct
  misc_feature 1..20: note = chemically synthesized
  source 1..20: mol_type = other DNA
ccagcctacatgcatttcaa

SEQ ID NO: 45715 - DNA, 20 bp, synthetic construct
  misc_feature 1..20: note = chemically synthesized
  source 1..20: mol_type = other DNA
ttcaagggatttatactaca

SEQ ID NO: 45716 - DNA, 20 bp, synthetic construct
  misc_feature 1..20: note = chemically synthesized
  source 1..20: mol_type = other DNA
ggatttatactacaaagatt

SEQ ID NO: 45717 - DNA, 20 bp, synthetic construct
  misc_feature 1..20: note = chemically synthesized
  source 1..20: mol_type = other DNA
gatttatactacaaagattc

SEQ ID NO: 45718 - DNA, 20 bp, synthetic construct
  misc_feature 1..20: note = chemically synthesized
  source 1..20: mol_type = other DNA
actacaaagattcaggtttt

SEQ ID NO: 45719 - DNA, 20 bp, synthetic construct
  misc_feature 1..20: note = chemically synthesized
  source 1..20: mol_type = other DNA
attcaggttttaagtttgca

SEQ ID NO: 45720 - DNA, 20 bp, synthetic construct
  misc_feature 1..20: note = chemically synthesized
  source 1..20: mol_type = other DNA
aagtttgcaaagacgtcata

SEQ ID NO: 45721 - DNA, 20 bp, synthetic construct
  misc_feature 1..20: note = chemically synthesized
  source 1..20: mol_type = other DNA
agtttgcaaagacgtcatat

SEQ ID NO: 45722 - DNA, 20 bp, synthetic construct
  misc_feature 1..20: note = chemically synthesized
  source 1..20: mol_type = other DNA
agacgtcatataggtacatt

SEQ ID NO: 45723 - DNA, 20 bp, synthetic construct
  misc_feature 1..20: note = chemically synthesized
  source 1..20: mol_type = other DNA
taggtacattcagaattcta

SEQ ID NO: 45724 - DNA, 20 bp, synthetic construct
  misc_feature 1..20: note = chemically synthesized
  source 1..20: mol_type = other DNA
gtacattcagaattctatgg

SEQ ID NO: 45725 - DNA, 20 bp, synthetic construct
  misc_feature 1..20: note = chemically synthesized
  source 1..20: mol_type = other DNA
tacattcagaattctatggt

SEQ ID NO: 45726 - DNA, 20 bp, synthetic construct
  misc_feature 1..20: note = chemically synthesized
  source 1..20: mol_type = other DNA
cagaattctatggtaggcac

SEQ ID NO: 45727 - DNA, 20 bp, synthetic construct
  misc_feature 1..20: note = chemically synthesized
  source 1..20: mol_type = other DNA
ttctatggtaggcacaagct

SEQ ID NO: 45728 - DNA, 20 bp, synthetic construct
  misc_feature 1..20: note = chemically synthesized
  source 1..20: mol_type = other DNA
taggcacaagctcagctttc

SEQ ID NO: 45729 - DNA, 20 bp, synthetic construct
  misc_feature 1..20: note = chemically synthesized
  source 1..20: mol_type = other DNA
gcacaagctcagctttccag

SEQ ID NO: 45730 - DNA, 20 bp, synthetic construct
  misc_feature 1..20: note = chemically synthesized
  source 1..20: mol_type = other DNA
tccagaagattcaatttgca

SEQ ID NO: 45731 - DNA, 20 bp, synthetic construct
  misc_feature 1..20: note = chemically synthesized
  source 1..20: mol_type = other DNA
tccttttacacaccatgttc

SEQ ID NO: 45732 - DNA, 20 bp, synthetic construct
  misc_feature 1..20: note = chemically synthesized
  source 1..20: mol_type = other DNA
accatgttcaagaaatcaac

SEQ ID NO: 45733 - DNA, 20 bp, synthetic construct
  misc_feature 1..20: note = chemically synthesized
  source 1..20: mol_type = other DNA
gttcaagaaatcaactggac

SEQ ID NO: 45734 - DNA, 20 bp, synthetic construct
  misc_feature 1..20: note = chemically synthesized
  source 1..20: mol_type = other DNA
aaatcaactggacaagcatc

SEQ ID NO: 45735 - DNA, 20 bp, synthetic construct
  misc_feature 1..20: note = chemically synthesized
  source 1..20: mol_type = other DNA
agtaaacacctattgtgtac

SEQ ID NO: 45736 - DNA, 20 bp, synthetic construct
  misc_feature 1..20: note = chemically synthesized
  source 1..20: mol_type = other DNA
gtaaacacctattgtgtacc

SEQ ID NO: 45737 - DNA, 20 bp, synthetic construct
  misc_feature 1..20: note = chemically synthesized
  source 1..20: mol_type = other DNA
aacacctattgtgtaccagg

SEQ ID NO: 45738 - DNA, 20 bp, synthetic construct
  misc_feature 1..20: note = chemically synthesized
  source 1..20: mol_type = other DNA
acacctattgtgtaccaggc

SEQ ID NO: 45739 - DNA, 20 bp, synthetic construct
  misc_feature 1..20: note = chemically synthesized
  source 1..20: mol_type = other DNA
acctattgtgtaccaggcag

SEQ ID NO: 45740 - DNA, 20 bp, synthetic construct
  misc_feature 1..20: note = chemically synthesized
  source 1..20: mol_type = other DNA
cctattgtgtaccaggcagg

SEQ ID NO: 45741 - DNA, 20 bp, synthetic construct
  misc_feature 1..20: note = chemically synthesized
  source 1..20: mol_type = other DNA
gtaccaggcaggaggatgaa

SEQ ID NO: 45742 - DNA, 20 bp, synthetic construct
  misc_feature 1..20: note = chemically synthesized
  source 1..20: mol_type = other DNA
taccaggcaggaggatgaaa

SEQ ID NO: 45743 - DNA, 20 bp, synthetic construct
  misc_feature 1..20: note = chemically synthesized
  source 1..20: mol_type = other DNA
accaggcaggaggatgaaaa

SEQ ID NO: 45744 - DNA, 20 bp, synthetic construct
  misc_feature 1..20: note = chemically synthesized
  source 1..20: mol_type = other DNA
ccaggcaggaggatgaaaag

SEQ ID NO: 45745 - DNA, 20 bp, synthetic construct
  misc_feature 1..20: note = chemically synthesized
  source 1..20: mol_type = other DNA
gcaggaggatgaaaagggga

SEQ ID NO: 45746 - DNA, 20 bp, synthetic construct
  misc_feature 1..20: note = chemically synthesized
  source 1..20: mol_type = other DNA
aggaggatgaaaaggggaaa

SEQ ID NO: 45747 - DNA, 20 bp, synthetic construct
  misc_feature 1..20: note = chemically synthesized
  source 1..20: mol_type = other DNA
gaggatgaaaaggggaaaga

SEQ ID NO: 45748 - DNA, 20 bp, synthetic construct
  misc_feature 1..20: note = chemically synthesized
  source 1..20: mol_type = other DNA
aaaaggggaaagagagctcc

SEQ ID NO: 45749 - DNA, 20 bp, synthetic construct
  misc_feature 1..20: note = chemically synthesized
  source 1..20: mol_type = other DNA
ggaaagagagctcctggcct

SEQ ID NO: 45750 - DNA, 20 bp, synthetic construct
  misc_feature 1..20: note = chemically synthesized
  source 1..20: mol_type = other DNA
ctggcctcagattgtacatg

SEQ ID NO: 45751 - DNA, 20 bp, synthetic construct
  misc_feature 1..20: note = chemically synthesized
  source 1..20: mol_type = other DNA
ttgtacatgtggcatgacat

SEQ ID NO: 45752 - DNA, 20 bp, synthetic construct
  misc_feature 1..20: note = chemically synthesized
  source 1..20: mol_type = other DNA
tgtacatgtggcatgacatg

SEQ ID NO: 45753 - DNA, 20 bp, synthetic construct
  misc_feature 1..20: note = chemically synthesized
  source 1..20: mol_type = other DNA
gacatgaggcttgctctttc

SEQ ID NO: 45754 - DNA, 20 bp, synthetic construct
  misc_feature 1..20: note = chemically synthesized
  source 1..20: mol_type = other DNA
atgaggcttgctctttctgg

SEQ ID NO: 45755 - DNA, 20 bp, synthetic construct
  misc_feature 1..20: note = chemically synthesized
  source 1..20: mol_type = other DNA
tgaggcttgctctttctgga

SEQ ID NO: 45756 - DNA, 20 bp, synthetic construct
  misc_feature 1..20: note = chemically synthesized
  source 1..20: mol_type = other DNA
gaggcttgctctttctggaa

SEQ ID NO: 45757 - DNA, 20 bp, synthetic construct
  misc_feature 1..20: note = chemically synthesized
  source 1..20: mol_type = other DNA
tctggaagggctgtcgatac

SEQ ID NO: 45758 - DNA, 20 bp, synthetic construct
  misc_feature 1..20: note = chemically synthesized
  source 1..20: mol_type = other DNA
ctggaagggctgtcgatact

SEQ ID NO: 45759 - DNA, 20 bp, synthetic construct
  misc_feature 1..20: note = chemically synthesized
  source 1..20: mol_type = other DNA
gaagggctgtcgatactggg

SEQ ID NO: 45760 - DNA, 20 bp, synthetic construct
  misc_feature 1..20: note = chemically synthesized
  source 1..20: mol_type = other DNA
gtcgatactgggaagaaaca

SEQ ID NO: 45761 - DNA, 20 bp, synthetic construct
  misc_feature 1..20: note = chemically synthesized
  source 1..20: mol_type = other DNA
tcgatactgggaagaaacaa

SEQ ID NO: 45762 - DNA, 20 bp, synthetic construct
  misc_feature 1..20: note = chemically synthesized
  source 1..20: mol_type = other DNA
gaatttatgatcctcccttg

SEQ ID NO: 45763 - DNA, 20 bp, synthetic construct
  misc_feature 1..20: note = chemically synthesized
  source 1..20: mol_type = other DNA
gatcctcccttgcagatgca

SEQ ID NO: 45764 - DNA, 20 bp, synthetic construct
  misc_feature 1..20: note = chemically synthesized
  source 1..20: mol_type = other DNA
cctcccttgcagatgcacag

SEQ ID NO: 45765 - DNA, 20 bp, synthetic construct
  misc_feature 1..20: note = chemically synthesized
  source 1..20: mol_type = other DNA
gcagatgcacagcagattcc

SEQ ID NO: 45766 - DNA, 20 bp, synthetic construct
  misc_feature 1..20: note = chemically synthesized
  source 1..20: mol_type = other DNA
acagcagattccgagtgaaa

SEQ ID NO: 45767 - DNA, 20 bp, synthetic construct
  misc_feature 1..20: note = chemically synthesized
  source 1..20: mol_type = other DNA
gaaatggcctgctctgaatc

SEQ ID NO: 45768 - DNA, 20 bp, synthetic construct
  misc_feature 1..20: note = chemically synthesized
  source 1..20: mol_type = other DNA
aaatggcctgctctgaatct

SEQ ID NO: 45769 - DNA, 20 bp, synthetic construct
  misc_feature 1..20: note = chemically synthesized
  source 1..20: mol_type = other DNA
cctgctctgaatctaggtgc

SEQ ID NO: 45770 - DNA, 20 bp, synthetic construct
  misc_feature 1..20: note = chemically synthesized
  source 1..20: mol_type = other DNA
tgctctgaatctaggtgctg

SEQ ID NO: 45771 - DNA, 20 bp, synthetic construct
  misc_feature 1..20: note = chemically synthesized
  source 1..20: mol_type = other DNA
aatctaggtgctggagtcca

SEQ ID NO: 45772 - DNA, 20 bp, synthetic construct
  misc_feature 1..20: note = chemically synthesized
  source 1..20: mol_type = other DNA
ctctttccactttgtttgca

SEQ ID NO: 45773 - DNA, 20 bp, synthetic construct
  misc_feature 1..20: note = chemically synthesized
  source 1..20: mol_type = other DNA
tgtttgcaaagacctcactc

SEQ ID NO: 45774 - DNA, 20 bp, synthetic construct
  misc_feature 1..20: note = chemically synthesized
  source 1..20: mol_type = other DNA
tttgcaaagacctcactcca

SEQ ID NO: 45775 - DNA, 20 bp, synthetic construct
  misc_feature 1..20: note = chemically synthesized
  source 1..20: mol_type = other DNA
tgcaaagacctcactccaga

SEQ ID NO: 45776 - DNA, 20 bp, synthetic construct
  misc_feature 1..20: note = chemically synthesized
  source 1..20: mol_type = other DNA
aagacctcactccagagagc

SEQ ID NO: 45777 - DNA, 20 bp, synthetic construct
  misc_feature 1..20: note = chemically synthesized
  source 1..20: mol_type = other DNA
ctccagagagccagtgcaca

SEQ ID NO: 45778 - DNA, 20 bp, synthetic construct
  misc_feature 1..20: note = chemically synthesized
  source 1..20: mol_type = other DNA
agagagccagtgcacaaaga

SEQ ID NO: 45779 - DNA, 20 bp, synthetic construct
  misc_feature 1..20: note = chemically synthesized
  source 1..20: mol_type = other DNA
gtgcacaaagacagtgcaac

SEQ ID NO: 45780 - DNA, 20 bp, synthetic construct
  misc_feature 1..20: note = chemically synthesized
  source 1..20: mol_type = other DNA
cacaaagacagtgcaaccag

SEQ ID NO: 45781 - DNA, 20 bp, synthetic construct
  misc_feature 1..20: note = chemically synthesized
  source 1..20: mol_type = other DNA
acaaagacagtgcaaccagt

SEQ ID NO: 45782 - DNA, 20 bp, synthetic construct
  misc_feature 1..20: note = chemically synthesized
  source 1..20: mol_type = other DNA
cagtgcaaccagtgggttga

SEQ ID NO: 45783 - DNA, 20 bp, synthetic construct
  misc_feature 1..20: note = chemically synthesized
  source 1..20: mol_type = other DNA
tgggttgacagtgactccat

SEQ ID NO: 45784 - DNA, 20 bp, synthetic construct
  misc_feature 1..20: note = chemically synthesized
  source 1..20: mol_type = other DNA
gggttgacagtgactccatg

SEQ ID NO: 45785 - DNA, 20 bp, synthetic construct
  misc_feature 1..20: note = chemically synthesized
  source 1..20: mol_type = other DNA
tgacagtgactccatgaggt

SEQ ID NO: 45786 - DNA, 20 bp, synthetic construct
  misc_feature 1..20: note = chemically synthesized
  source 1..20: mol_type = other DNA
gacagtgactccatgaggta

SEQ ID NO: 45787 - DNA, 20 bp, synthetic construct
  misc_feature 1..20: note = chemically synthesized
  source 1..20: mol_type = other DNA
gtgactccatgaggtaaggt

SEQ ID NO: 45788 - DNA, 20 bp, synthetic construct
  misc_feature 1..20: note = chemically synthesized
  source 1..20: mol_type = other DNA
gactccatgaggtaaggtca

SEQ ID NO: 45789 - DNA, 20 bp, synthetic construct
  misc_feature 1..20: note = chemically synthesized
  source 1..20: mol_type = other DNA
aggtcagagttatccccatc

SEQ ID NO: 45790 - DNA, 20 bp, synthetic construct
  misc_feature 1..20: note = chemically synthesized
  source 1..20: mol_type = other DNA
ccccatcgagcccgccatcg

SEQ ID NO: 45791 - DNA, 20 bp, synthetic construct
  misc_feature 1..20: note = chemically synthesized
  source 1..20: mol_type = other DNA
tcgagcccgccatcgcagca

SEQ ID NO: 45792 - DNA, 20 bp, synthetic construct
  misc_feature 1..20: note = chemically synthesized
  source 1..20: mol_type = other DNA
gagcccgccatcgcagcaca

SEQ ID NO: 45793 - DNA, 20 bp, synthetic construct
  misc_feature 1..20: note = chemically synthesized
  source 1..20: mol_type = other DNA
cccgccatcgcagcacagag

SEQ ID NO: 45794 - DNA, 20 bp, synthetic construct
  misc_feature 1..20: note = chemically synthesized
  source 1..20: mol_type = other DNA
ccgccatcgcagcacagagt

SEQ ID NO: 45795 - DNA, 20 bp, synthetic construct
  misc_feature 1..20: note = chemically synthesized
  source 1..20: mol_type = other DNA
gccatcgcagcacagagtag

SEQ ID NO: 45796 - DNA, 20 bp, synthetic construct
  misc_feature 1..20: note = chemically synthesized
  source 1..20: mol_type = other DNA
cagcacagagtaggagctca

SEQ ID NO: 45797 - DNA, 20 bp, synthetic construct
  misc_feature 1..20: note = chemically synthesized
  source 1..20: mol_type = other DNA
aggagctcatggtttgctga

SEQ ID NO: 45798 - DNA, 20 bp, synthetic construct
  misc_feature 1..20: note = chemically synthesized
  source 1..20: mol_type = other DNA
gagctcatggtttgctgaca

SEQ ID NO: 45799 - DNA, 20 bp, synthetic construct
  misc_feature 1..20: note = chemically synthesized
  source 1..20: mol_type = other DNA
agctcatggtttgctgacag

SEQ ID NO: 45800 - DNA, 20 bp, synthetic construct
  misc_feature 1..20: note = chemically synthesized
  source 1..20: mol_type = other DNA
tcatggtttgctgacagagg

SEQ ID NO: 45801 - DNA, 20 bp, synthetic construct
  misc_feature 1..20: note = chemically synthesized
  source 1..20: mol_type = other DNA
tggtttgctgacagaggtgg

SEQ ID NO: 45802 - DNA, 20 bp, synthetic construct
  misc_feature 1..20: note = chemically synthesized
  source 1..20: mol_type = other DNA
gtttgctgacagaggtggca

SEQ ID NO: 45803 - DNA, 20 bp, synthetic construct
  misc_feature 1..20: note = chemically synthesized
  source 1..20: mol_type = other DNA
tttgctgacagaggtggcag

SEQ ID NO: 45804 - DNA, 20 bp, synthetic construct
  misc_feature 1..20: note = chemically synthesized
  source 1..20: mol_type = other DNA
gctgacagaggtggcagagg

SEQ ID NO: 45805 - DNA, 20 bp, synthetic construct
  misc_feature 1..20: note = chemically synthesized
  source 1..20: mol_type = other DNA
tccttcctgttgcctgtaat

SEQ ID NO: 45806 - DNA, 20 bp, synthetic construct
  misc_feature 1..20: note = chemically synthesized
  source 1..20: mol_type = other DNA
ttgtatttgcaatgtgcttt

SEQ ID NO: 45807 - DNA, 20 bp, synthetic construct
  misc_feature 1..20: note = chemically synthesized
  source 1..20: mol_type = other DNA
tatttgcaatgtgcttttgg

SEQ ID NO: 45808 - DNA, 20 bp, synthetic construct
  misc_feature 1..20: note = chemically synthesized
  source 1..20: mol_type = other DNA
ttttggcagcttcctcatca

SEQ ID NO: 45809 - DNA, 20 bp, synthetic construct
  misc_feature 1..20: note = chemically synthesized
  source 1..20: mol_type = other DNA
tttggcagcttcctcatcaa

SEQ ID NO: 45810 - DNA, 20 bp, synthetic construct
  misc_feature 1..20: note = chemically synthesized
  source 1..20: mol_type = other DNA
tcctcatcaaaggcctcccc

SEQ ID NO: 45811 - DNA, 20 bp, synthetic construct
  misc_feature 1..20: note = chemically synthesized
  source 1..20: mol_type = other DNA
ctcatcaaaggcctcccctg

SEQ ID NO: 45812 - DNA, 20 bp, synthetic construct
  misc_feature 1..20: note = chemically synthesized
  source 1..20: mol_type = other DNA
tcaaaggcctcccctggagc

SEQ ID NO: 45813 - DNA, 20 bp, synthetic construct
  misc_feature 1..20: note = chemically synthesized
  source 1..20: mol_type = other DNA
ggcctcccctggagcaagaa

SEQ ID NO: 45814 - DNA, 20 bp, synthetic construct
  misc_feature 1..20: note = chemically synthesized
  source 1..20: mol_type = other DNA
tcccctggagcaagaataga

SEQ ID NO: 45815 - DNA, 20 bp, synthetic construct
  misc_feature 1..20: note = chemically synthesized
  source 1..20: mol_type = other DNA
cccctggagcaagaatagat

SEQ ID NO: 45816 - DNA, 20 bp, synthetic construct
  misc_feature 1..20: note = chemically synthesized
  source 1..20: mol_type = other DNA
cctggagcaagaatagatgg

SEQ ID NO: 45817 - DNA, 20 bp, synthetic construct
  misc_feature 1..20: note = chemically synthesized
  source 1..20: mol_type = other DNA
ctttccctgctgctcccctt

SEQ ID NO: 45818 - DNA, 20 bp, synthetic construct
  misc_feature 1..20: note = chemically synthesized
  source 1..20: mol_type = other DNA
tttccctgctgctccccttt

SEQ ID NO: 45819 - DNA, 20 bp, synthetic construct
  misc_feature 1..20: note = chemically synthesized
  source 1..20: mol_type = other DNA
gctgctcccctttgggacct

SEQ ID NO: 45820 - DNA, 20 bp, synthetic construct
  misc_feature 1..20: note = chemically synthesized
  source 1..20: mol_type = other DNA
gaccttggcctctcacctac

SEQ ID NO: 45821 - DNA, 20 bp, synthetic construct
  misc_feature 1..20: note = chemically synthesized
  source 1..20: mol_type = other DNA
accttggcctctcacctacc

SEQ ID NO: 45822 - DNA, 20 bp, synthetic construct
  misc_feature 1..20: note = chemically synthesized
  source 1..20: mol_type = other DNA
ccttggcctctcacctaccg

SEQ ID NO: 45823 - DNA, 20 bp, synthetic construct
  misc_feature 1..20: note = chemically synthesized
  source 1..20: mol_type = other DNA
gctgcgatggcgggctcgat

SEQ ID NO: 45824 - DNA, 20 bp, synthetic construct
  misc_feature 1..20: note = chemically synthesized
  source 1..20: mol_type = other DNA
ataactctgaccttacctca

SEQ ID NO: 45825 - DNA, 20 bp, synthetic construct
  misc_feature 1..20: note = chemically synthesized
  source 1..20: mol_type = other DNA
gtctttgtgcactggctctc

SEQ ID NO: 45826 - DNA, 20 bp, synthetic construct
  misc_feature 1..20: note = chemically synthesized
  source 1..20: mol_type = other DNA
tcagagcaggccatttcact

SEQ ID NO: 45827 - DNA, 20 bp, synthetic construct
  misc_feature 1..20: note = chemically synthesized
  source 1..20: mol_type = other DNA
tctgctgtgcatctgcaagg

SEQ ID NO: 45828 - DNA, 20 bp, synthetic construct
  misc_feature 1..20: note = chemically synthesized
  source 1..20: mol_type = other DNA
tggtacacaataggtgttta

SEQ ID NO: 45829 - DNA, 20 bp, synthetic construct
  misc_feature 1..20: note = chemically synthesized
  source 1..20: mol_type = other DNA
tcttgaacatggtgtgtaaa

SEQ ID NO: 45830 - DNA, 20 bp, synthetic construct
  misc_feature 1..20: note = chemically synthesized
  source 1..20: mol_type = other DNA
gtaaaaggaatctttgcaaa

SEQ ID NO: 45831 - DNA, 20 bp, synthetic construct
  misc_feature 1..20: note = chemically synthesized
  source 1..20: mol_type = other DNA
agctgagcttgtgcctacca

SEQ ID NO: 45832 - DNA, 20 bp, synthetic construct
  misc_feature 1..20: note = chemically synthesized
  source 1..20: mol_type = other DNA
cttgtgcctaccatagaatt

SEQ ID NO: 45833 - DNA, 20 bp, synthetic construct
  misc_feature 1..20: note = chemically synthesized
  source 1..20: mol_type = other DNA
cgtctttgcaaacttaaaac

SEQ ID NO: 45834 - DNA, 20 bp, synthetic construct
  misc_feature 1..20: note = chemically synthesized
  source 1..20: mol_type = other DNA
tagttggtaaggtcagtgtg

SEQ ID NO: 45835 - DNA, 20 bp, synthetic construct
  misc_feature 1..20: note = chemically synthesized
  source 1..20: mol_type = other DNA
cataaagggcagaggccgga

SEQ ID NO: 45836 - DNA, 20 bp, synthetic construct
  misc_feature 1..20: note = chemically synthesized
  source 1..20: mol_type = other DNA
gccaggttaaggccagtgga

SEQ ID NO: 45837 - DNA, 20 bp, synthetic construct
  misc_feature 1..20: note = chemically synthesized
  source 1..20: mol_type = other DNA
aaagaattcggtgggcagcg

SEQ ID NO: 45838 - DNA, 20 bp, synthetic construct
  misc_feature 1..20: note = chemically synthesized
  source 1..20: mol_type = other DNA
gggcagcgaggagtccacag

SEQ ID NO: 45839 - DNA, 20 bp, synthetic construct
  misc_feature 1..20: note = chemically synthesized
  source 1..20: mol_type = other DNA
aaggtgggcccggcagaact

SEQ ID NO: 45840 - DNA, 20 bp, synthetic construct
  misc_feature 1..20: note = chemically synthesized
  source 1..20: mol_type = other DNA
ttggagtctggcatcccacg

SEQ ID NO: 45841 - DNA, 20 bp, synthetic construct
  misc_feature 1..20: note = chemically synthesized
  source 1..20: mol_type = other DNA
ggcctgccttccagcccagt

SEQ ID NO: 45842 - DNA, 20 bp, synthetic construct
  misc_feature 1..20: note = chemically synthesized
  source 1..20: mol_type = other DNA
ttccagcccagttaggattt

SEQ ID NO: 45843 - DNA, 20 bp, synthetic construct
  misc_feature 1..20: note = chemically synthesized
  source 1..20: mol_type = other DNA
gaaacctgatcctccagtcc

SEQ ID NO: 45844 - DNA, 20 bp, synthetic construct
  misc_feature 1..20: note = chemically synthesized
  source 1..20: mol_type = other DNA
tccgttaatgtttaatcaga

SEQ ID NO: 45845 - DNA, 20 bp, synthetic construct
  misc_feature 1..20: note = chemically synthesized
  source 1..20: mol_type = other DNA
gcgggcgccgccgttcagtt

SEQ ID NO: 45846 - DNA, 20 bp, synthetic construct
  misc_feature 1..20: note = chemically synthesized
  source 1..20: mol_type = other DNA
agttcagggtctgagcctgg

SEQ ID NO: 45847 - DNA, 20 bp, synthetic construct
  misc_feature 1..20: note = chemically synthesized
  source 1..20: mol_type = other DNA
agcggctcccagctcccagc

SEQ ID NO: 45848 - DNA, 20 bp, synthetic construct
  misc_feature 1..20: note = chemically synthesized
  source 1..20: mol_type = other DNA
tgctgctgctgctgctgctc

SEQ ID NO: 45849 - DNA, 20 bp, synthetic construct
  misc_feature 1..20: note = chemically synthesized
  source 1..20: mol_type = other DNA
ttccaccgctgcgccaaggt

SEQ ID NO: 45850 - DNA, 20 bp, synthetic construct
  misc_feature 1..20: note = chemically synthesized
  source 1..20: mol_type = other DNA
ctgcgccaaggtgcgggtgt

SEQ ID NO: 45851 - DNA, 20 bp, synthetic construct
  misc_feature 1..20: note = chemically synthesized
  source 1..20: mol_type = other DNA
cccccatgtaagagaggaag

SEQ ID NO: 45852 - DNA, 20 bp, synthetic construct
  misc_feature 1..20: note = chemically synthesized
  source 1..20: mol_type = other DNA
aggcaaggcggcgggggagg

SEQ ID NO: 45853 - DNA, 20 bp, synthetic construct
  misc_feature 1..20: note = chemically synthesized
  source 1..20: mol_type = other DNA
ctattcagtgggaaggttcg

SEQ ID NO: 45854 - DNA, 20 bp, synthetic construct
  misc_feature 1..20: note = chemically synthesized
  source 1..20: mol_type = other DNA
aagggcgagcagagcactgc

SEQ ID NO: 45855 - DNA, 20 bp, synthetic construct
  misc_feature 1..20: note = chemically synthesized
  source 1..20: mol_type = other DNA
tctgcctcgccgcggcacag

SEQ ID NO: 45856 - DNA, 20 bp, synthetic construct
  misc_feature 1..20: note = chemically synthesized
  source 1..20: mol_type = other DNA
gccgcggcacaggtgggtga

SEQ ID NO: 45857 - DNA, 20 bp, synthetic construct
  misc_feature 1..20: note = chemically synthesized
  source 1..20: mol_type = other DNA
cggcacaggtgggtgaagga

SEQ ID NO: 45858 - DNA, 20 bp, synthetic construct
  misc_feature 1..20: note = chemically synthesized
  source 1..20: mol_type = other DNA
aaagcgggcttgccattata

SEQ ID NO: 45859 - DNA, 20 bp, synthetic construct
  misc_feature 1..20: note = chemically synthesized
  source 1..20: mol_type = other DNA
tttggaaaacatgggcagcg

SEQ ID NO: 45860 - DNA, 20 bp, synthetic construct
  misc_feature 1..20: note = chemically synthesized
  source 1..20: mol_type = other DNA
ggccctacccgagacagggg

SEQ ID NO: 45861 - DNA, 20 bp, synthetic construct
  misc_feature 1..20: note = chemically synthesized
  source 1..20: mol_type = other DNA
gtctgccgaccgtgtgcggg

SEQ ID NO: 45862 - DNA, 20 bp, synthetic construct
  misc_feature 1..20: note = chemically synthesized
  source 1..20: mol_type = other DNA
aggttctgtgtcccccagct

SEQ ID NO: 45863 - DNA, 20 bp, synthetic construct
  misc_feature 1..20: note = chemically synthesized
  source 1..20: mol_type = other DNA
ccccagcttggagtcagatg

SEQ ID NO: 45864 - DNA, 20 bp, synthetic construct
  misc_feature 1..20: note = chemically synthesized
  source 1..20: mol_type = other DNA
gcttggagtcagatgtgggg

SEQ ID NO: 45865 - DNA, 20 bp, synthetic construct
  misc_feature 1..20: note = chemically synthesized
  source 1..20: mol_type = other DNA
aagggaaagttctgttgacc

SEQ ID NO: 45866 - DNA, 20 bp, synthetic construct
  misc_feature 1..20: note = chemically synthesized
  source 1..20: mol_type = other DNA
acttacaatgcaagccccgg

SEQ ID NO: 45867 - DNA, 20 bp, synthetic construct
  misc_feature 1..20: note = chemically synthesized
  source 1..20: mol_type = other DNA
ctgcctgcccacgcttctgt

SEQ ID NO: 45868 - DNA, 20 bp, synthetic construct
  misc_feature 1..20: note = chemically synthesized
  source 1..20: mol_type = other DNA
cacgcttctgtctgagtgtg

SEQ ID NO: 45869 - DNA, 20 bp, synthetic construct
  misc_feature 1..20: note = chemically synthesized
  source 1..20: mol_type = other DNA
tgtctgagtgtgctgggtgg

SEQ ID NO: 45870 - DNA, 20 bp, synthetic construct
  misc_feature 1..20: note = chemically synthesized
  source 1..20: mol_type = other DNA
ctgagcctttgactttctcg

SEQ ID NO: 45871 - DNA, 20 bp, synthetic construct
  misc_feature 1..20: note = chemically synthesized
  source 1..20: mol_type = other DNA
gactttctcgagggatgttg

SEQ ID NO: 45872 - DNA, 20 bp, synthetic construct
  misc_feature 1..20: note = chemically synthesized
  source 1..20: mol_type = other DNA
ggatgttgtggggttgtggc

SEQ ID NO: 45873 - DNA, 20 bp, synthetic construct
  misc_feature 1..20: note = chemically synthesized
  source 1..20: mol_type = other DNA
aaacaactgttctggaaata

SEQ ID NO: 45874 - DNA, 20 bp, synthetic construct
  misc_feature 1..20: note = chemically synthesized
  source 1..20: mol_type = other DNA
tgagtaccccatcctgagag

SEQ ID NO: 45875 - DNA, 20 bp, synthetic construct
  misc_feature 1..20: note = chemically synthesized
  source 1..20: mol_type = other DNA
accacctgaaccaagccctt

SEQ ID NO: 45876 - DNA, 20 bp, synthetic construct
  misc_feature 1..20: note = chemically synthesized
  source 1..20: mol_type = other DNA
tcattcaatggttattttgt

SEQ ID NO: 45877 - DNA, 20 bp, synthetic construct
  misc_feature 1..20: note = chemically synthesized
  source 1..20: mol_type = other DNA
caatggttattttgtgggaa

SEQ ID NO: 45878 - DNA, 20 bp, synthetic construct
  misc_feature 1..20: note = chemically synthesized
  source 1..20: mol_type = other DNA
tattttgtgggaatcgaatt

SEQ ID NO: 45879 - DNA, 20 bp, synthetic construct
  misc_feature 1..20: note = chemically synthesized
  source 1..20: mol_type = other DNA
tcaccccaggtgcattagaa

SEQ ID NO: 45880 - DNA, 20 bp, synthetic construct
  misc_feature 1..20: note = chemically synthesized
  source 1..20: mol_type = other DNA
agaactgacactccactgca

SEQ ID NO: 45881 - DNA, 20 bp, synthetic construct
  misc_feature 1..20: note = chemically synthesized
  source 1..20: mol_type = other DNA
ttagcggaaggcattttcag

SEQ ID NO: 45882 - DNA, 20 bp, synthetic construct
  misc_feature 1..20: note = chemically synthesized
  source 1..20: mol_type = other DNA
tgggtctttgaagcattagt

SEQ ID NO: 45883 - DNA, 20 bp, synthetic construct
  misc_feature 1..20: note = chemically synthesized
  source 1..20: mol_type = other DNA
ttcagcgatgatggtgtcat

SEQ ID NO: 45884 - DNA, 20 bp, synthetic construct
  misc_feature 1..20: note = chemically synthesized
  source 1..20: mol_type = other DNA
gtgtcatgagaattttattc

SEQ ID NO: 45885 - DNA, 20 bp, synthetic construct
  misc_feature 1..20: note = chemically synthesized
  source 1..20: mol_type = other DNA
tttttcttttttttttgaga

SEQ ID NO: 45886 - DNA, 20 bp, synthetic construct
  misc_feature 1..20: note = chemically synthesized
  source 1..20: mol_type = other DNA
ttcgctcttgttgcccaggc

SEQ ID NO: 45887 - DNA, 20 bp, synthetic construct
  misc_feature 1..20: note = chemically synthesized
  source 1..20: mol_type = other DNA
ctcactgcaacatctgtctc

SEQ ID NO: 45888 - DNA, 20 bp, synthetic construct
  misc_feature 1..20: note = chemically synthesized
  source 1..20: mol_type = other DNA
gcctcagcctcccaagaagc

SEQ ID NO: 45889 - DNA, 20 bp, synthetic construct
  misc_feature 1..20: note = chemically synthesized
  source 1..20: mol_type = other DNA
ttttgtatttttagtagaga

SEQ ID NO: 45890 - DNA, 20 bp, synthetic construct
  misc_feature 1..20: note = chemically synthesized
  source 1..20: mol_type = other DNA
gcaaactcctgacctcctca

SEQ ID NO: 45891 - DNA, 20 bp, synthetic construct
  misc_feature 1..20: note = chemically synthesized
  source 1..20: mol_type = other DNA
gcctcagcctcccaaagtgc

SEQ ID NO: 45892 - DNA, 20 bp, synthetic construct
  misc_feature 1..20: note = chemically synthesized
  source 1..20: mol_type = other DNA
attatttttaatttagttgt

SEQ ID NO: 45893 - DNA, 20 bp, synthetic construct
  misc_feature 1..20: note = chemically synthesized
  source 1..20: mol_type = other DNA
accgttttggccctaaggct

SEQ ID NO: 45894 - DNA, 20 bp, synthetic construct
  misc_feature 1..20: note = chemically synthesized
  source 1..20: mol_type = other DNA
gccctaaggctttgggtaaa

SEQ ID NO: 45895 - DNA, 20 bp, synthetic construct
  misc_feature 1..20: note = chemically synthesized
  source 1..20: mol_type = other DNA
ggactctgttctactctgac

SEQ ID NO: 45896 - DNA, 20 bp, synthetic construct
  misc_feature 1..20: note = chemically synthesized
  source 1..20: mol_type = other DNA
agatgcatatatacagagat

SEQ ID NO: 45897 - DNA, 20 bp, synthetic construct
  misc_feature 1..20: note = chemically synthesized
  source 1..20: mol_type = other DNA
gtaggggccaaggaggagca

SEQ ID NO: 45898 - DNA, 20 bp, synthetic construct
  misc_feature 1..20: note = chemically synthesized
  source 1..20: mol_type = other DNA
tggggcctaatgggaggtgt

SEQ ID NO: 45899 - DNA, 20 bp, synthetic construct
  misc_feature 1..20: note = chemically synthesized
  source 1..20: mol_type = other DNA
ttggtgccgtccttgtgata

SEQ ID NO: 45900 - DNA, 20 bp, synthetic construct
  misc_feature 1..20: note = chemically synthesized
  source 1..20: mol_type = other DNA
catgcttcctggagagcttg

SEQ ID NO: 45901 - DNA, 20 bp, synthetic construct
  misc_feature 1..20: note = chemically synthesized
  source 1..20: mol_type = other DNA
agagcttgcagaatcatgag

SEQ ID NO: 45902 - DNA, 20 bp, synthetic construct
  misc_feature 1..20: note = chemically synthesized
  source 1..20: mol_type = other DNA
tgcctgcatttgtagagcat

SEQ ID NO: 45903 - DNA, 20 bp, synthetic construct
  misc_feature 1..20: note = chemically synthesized
  source 1..20: mol_type = other DNA
gtatctgaggctccgagagg

SEQ ID NO: 45904 - DNA, 20 bp, synthetic construct
  misc_feature 1..20: note = chemically synthesized
  source 1..20: mol_type = other DNA
caaccagtaaatattggagc

SEQ ID NO: 45905 - DNA, 20 bp, synthetic construct
  misc_feature 1..20: note = chemically synthesized
  source 1..20: mol_type = other DNA
tctgactggggcatggggga

SEQ ID NO: 45906 - DNA, 20 bp, synthetic construct
  misc_feature 1..20: note = chemically synthesized
  source 1..20: mol_type = other DNA
gcgaccaggcccgtagagag

SEQ ID NO: 45907 - DNA, 20 bp, synthetic construct
  misc_feature 1..20: note = chemically synthesized
  source 1..20: mol_type = other DNA
gtacagaggaaaacctgttg

SEQ ID NO: 45908 - DNA, 20 bp, synthetic construct
  misc_feature 1..20: note = chemically synthesized
  source 1..20: mol_type = other DNA
cccgtagttcccatttttgc

SEQ ID NO: 45909 - DNA, 20 bp, synthetic construct
  misc_feature 1..20: note = chemically synthesized
  source 1..20: mol_type = other DNA
tgaaagtgttatataaccat

SEQ ID NO: 45910 - DNA, 20 bp, synthetic construct
  misc_feature 1..20: note = chemically synthesized
  source 1..20: mol_type = other DNA
aataataatagttggcctat

SEQ ID NO: 45911 - DNA, 20 bp, synthetic construct
  misc_feature 1..20: note = chemically synthesized
  source 1..20: mol_type = other DNA
ttttgttgtaatttgtaagt

SEQ ID NO: 45912 - DNA, 20 bp, synthetic construct
  misc_feature 1..20: note = chemically synthesized
  source 1..20: mol_type = other DNA
ggggtgagataaagtacacc

SEQ ID NO: 45913 - DNA, 20 bp, synthetic construct
  misc_feature 1..20: note = chemically synthesized
  source 1..20: mol_type = other DNA
taaagtacacctagggtttg

SEQ ID NO: 45914 - DNA, 20 bp, synthetic construct
  misc_feature 1..20: note = chemically synthesized
  source 1..20: mol_type = other DNA
tgttcctccttgcatggggc

SEQ ID NO: 45915 - DNA, 20 bp, synthetic construct
  misc_feature 1..20: note = chemically synthesized
  source 1..20: mol_type = other DNA
gcaggcccaggctgcccgcc

SEQ ID NO: 45916 - DNA, 20 bp, synthetic construct
  misc_feature 1..20: note = chemically synthesized
  source 1..20: mol_type = other DNA
ttcctggcttcctggtgaag

SEQ ID NO: 45917 - DNA, 20 bp, synthetic construct
  misc_feature 1..20: note = chemically synthesized
  source 1..20: mol_type = other DNA
gctggtgagccacccttttt

SEQ ID NO: 45918 - DNA, 20 bp, synthetic construct
  misc_feature 1..20: note = chemically synthesized
  source 1..20: mol_type = other DNA
aagtatgtattgagcactta

SEQ ID NO: 45919 - DNA, 20 bp, synthetic construct
  misc_feature 1..20: note = chemically synthesized
  source 1..20: mol_type = other DNA
gtaactactggctttctgta

SEQ ID NO: 45920 - DNA, 20 bp, synthetic construct
  misc_feature 1..20: note = chemically synthesized
  source 1..20: mol_type = other DNA
aggggaccacacagacagct

SEQ ID NO: 45921 - DNA, 20 bp, synthetic construct
  misc_feature 1..20: note = chemically synthesized
  source 1..20: mol_type = other DNA
cagacagctaggggtagagc

SEQ ID NO: 45922 - DNA, 20 bp, synthetic construct
  misc_feature 1..20: note = chemically synthesized
  source 1..20: mol_type = other DNA
aacctgtagggacaaggccc

SEQ ID NO: 45923 - DNA, 20 bp, synthetic construct
  misc_feature 1..20: note = chemically synthesized
  source 1..20: mol_type = other DNA
cctgggatgttcagtggagc

SEQ ID NO: 45924 - DNA, 20 bp, synthetic construct
  misc_feature 1..20: note = chemically synthesized
  source 1..20: mol_type = other DNA
tttataaaaaagcatgactc

SEQ ID NO: 45925 - DNA, 20 bp, synthetic construct
  misc_feature 1..20: note = chemically synthesized
  source 1..20: mol_type = other DNA
cctttgaagctgttgctatc

SEQ ID NO: 45926 - DNA, 20 bp, synthetic construct
  misc_feature 1..20: note = chemically synthesized
  source 1..20: mol_type = other DNA
gtgaagtcccttctttagga

SEQ ID NO: 45927 - DNA, 20 bp, synthetic construct
  misc_feature 1..20: note = chemically synthesized
  source 1..20: mol_type = other DNA
cagggtggccctcctccctc

SEQ ID NO: 45928 - DNA, 20 bp, synthetic construct
  misc_feature 1..20: note = chemically synthesized
  source 1..20: mol_type = other DNA
gtggaggggcagaaagggga

SEQ ID NO: 45929 - DNA, 20 bp, synthetic construct
  misc_feature 1..20: note = chemically synthesized
  source 1..20: mol_type = other DNA
aagatttgaagcactagggc

SEQ ID NO: 45930 - DNA, 20 bp, synthetic construct
  misc_feature 1..20: note = chemically synthesized
  source 1..20: mol_type = other DNA
agcactagggccagggtgag

SEQ ID NO: 45931 - DNA, 20 bp, synthetic construct
  misc_feature 1..20: note = chemically synthesized
  source 1..20: mol_type = other DNA
cctaaagaagggacttcact

SEQ ID NO: 45932 - DNA, 20 bp, synthetic construct
  misc_feature 1..20: note = chemically synthesized
  source 1..20: mol_type = other DNA
ctggatagcaacagcttcaa

SEQ ID NO: 45933 - DNA, 20 bp, synthetic construct
  misc_feature 1..20: note = chemically synthesized
  source 1..20: mol_type = other DNA
ttcaaaggaattttggaccc

SEQ ID NO: 45934 - DNA, 20 bp, synthetic construct
  misc_feature 1..20: note = chemically synthesized
  source 1..20: mol_type = other DNA
ggcagcagatgcattggcac

SEQ ID NO: 45935 - DNA, 20 bp, synthetic construct
  misc_feature 1..20: note = chemically synthesized
  source 1..20: mol_type = other DNA
aatggctggcaggcagacca

SEQ ID NO: 45936 - DNA, 20 bp, synthetic construct
  misc_feature 1..20: note = chemically synthesized
  source 1..20: mol_type = other DNA
ggggcatggccaggcttaaa

SEQ ID NO: 45937 - DNA, 20 bp, synthetic construct
  misc_feature 1..20: note = chemically synthesized
  source 1..20: mol_type = other DNA
caggaagtgccattcccaaa

SEQ ID NO: 45938 - DNA, 20 bp, synthetic construct
  misc_feature 1..20: note = chemically synthesized
  source 1..20: mol_type = other DNA
agaaggccatggaagacatg

SEQ ID NO: 45939 - DNA, 20 bp, synthetic construct
  misc_feature 1..20: note = chemically synthesized
  source 1..20: mol_type = other DNA
gtgcgctctgactgcgagag

SEQ ID NO: 45940 - DNA, 20 bp, synthetic construct
  misc_feature 1..20: note = chemically synthesized
  source 1..20: mol_type = other DNA
gtaggtgccaggcaacctcc

SEQ ID NO: 45941 - DNA, 20 bp, synthetic construct
  misc_feature 1..20: note = chemically synthesized
  source 1..20: mol_type = other DNA
ttacaacaaaagagacacaa

SEQ ID NO: 45942 - DNA, 20 bp, synthetic construct
  misc_feature 1..20: note = chemically synthesized
  source 1..20: mol_type = other DNA
cccctcccccatgccccagt

SEQ ID NO: 45943 - DNA, 20 bp, synthetic construct
  misc_feature 1..20: note = chemically synthesized
  source 1..20: mol_type = other DNA
ggagccaggaaaccgtggac

SEQ ID NO: 45944 - DNA, 20 bp, synthetic construct
  misc_feature 1..20: note = chemically synthesized
  source 1..20: mol_type = other DNA
ataggcctgctgggaaagtc

SEQ ID NO: 45945 - DNA, 20 bp, synthetic construct
  misc_feature 1..20: note = chemically synthesized
  source 1..20: mol_type = other DNA
gctctacaaatgcaggcaga

SEQ ID NO: 45946 - DNA, 20 bp, synthetic construct
  misc_feature 1..20: note = chemically synthesized
  source 1..20: mol_type = other DNA
ccttttgtgttgctatataa

SEQ ID NO: 45947 - DNA, 20 bp, synthetic construct
  misc_feature 1..20: note = chemically synthesized
  source 1..20: mol_type = other DNA
atataaaggaatacctgaag

SEQ ID NO: 45948 - DNA, 20 bp, synthetic construct
  misc_feature 1..20: note = chemically synthesized
  source 1..20: mol_type = other DNA
gtgagtaatttacaaggaaa

SEQ ID NO: 45949 - DNA, 20 bp, synthetic construct
  misc_feature 1..20: note = chemically synthesized
  source 1..20: mol_type = other DNA
gacggcaccaagcctttcac

SEQ ID NO: 45950 - DNA, 20 bp, synthetic construct
  misc_feature 1..20: note = chemically synthesized
  source 1..20: mol_type = other DNA
cactggctccccacagcctc

SEQ ID NO: 45951 - DNA, 20 bp, synthetic construct
  misc_feature 1..20: note = chemically synthesized
  source 1..20: mol_type = other DNA
tatgcatcttggactccagt

SEQ ID NO: 45952 - DNA, 20 bp, synthetic construct
  misc_feature 1..20: note = chemically synthesized
  source 1..20: mol_type = other DNA
ggactccagtcagagtagaa

SEQ ID NO: 45953 - DNA, 20 bp, synthetic construct
  misc_feature 1..20: note = chemically synthesized
  source 1..20: mol_type = other DNA
ttttgaacctcagaacttgt

SEQ ID NO: 45954 - DNA, 20 bp, synthetic construct
  misc_feature 1..20: note = chemically synthesized
  source 1..20: mol_type = other DNA
gaaaggcagtaatgggcaat

SEQ ID NO: 45955 - DNA, 20 bp, synthetic construct
  misc_feature 1..20: note = chemically synthesized
  source 1..20: mol_type = other DNA
ggcaatcagagtctgcttgg

SEQ ID NO: 45956 - DNA, 20 bp, synthetic construct
  misc_feature 1..20: note = chemically synthesized
  source 1..20: mol_type = other DNA
taatctatgcagcaaaatat

SEQ ID NO: 45957 - DNA, 20 bp, synthetic construct
  misc_feature 1..20: note = chemically synthesized
  source 1..20: mol_type = other DNA
aacattttacatttcagacg

SEQ ID NO: 45958 - DNA, 20 bp, synthetic construct
  misc_feature 1..20: note = chemically synthesized
  source 1..20: mol_type = other DNA
actttgggaggctgaggcgg

SEQ ID NO: 45959 - DNA, 20 bp, synthetic construct
  misc_feature 1..20: note = chemically synthesized
  source 1..20: mol_type = other DNA
gaggcgggaggatcacctcc

SEQ ID NO: 45960 - DNA, 20 bp, synthetic construct
  misc_feature 1..20: note = chemically synthesized
  source 1..20: mol_type = other DNA
tcggatccactgaggaggtc

SEQ ID NO: 45961 - DNA, 20 bp, synthetic construct
  misc_feature 1..20: note = chemically synthesized
  source 1..20: mol_type = other DNA
ttcatggtacctcctaatcc

SEQ ID NO: 45962 - DNA, 20 bp, synthetic construct
  misc_feature 1..20: note = chemically synthesized
  source 1..20: mol_type = other DNA
tgccttccgctaaataaaaa

SEQ ID NO: 45963 - DNA, 20 bp, synthetic construct
  misc_feature 1..20: note = chemically synthesized
  source 1..20: mol_type = other DNA
ttccgctaaataaaaattga

SEQ ID NO: 45964 - DNA, 20 bp, synthetic construct
  misc_feature 1..20: note = chemically synthesized
  source 1..20: mol_type = other DNA
ataaaaattgaatgaattgg

SEQ ID NO: 45965 - DNA, 20 bp, synthetic construct
  misc_feature 1..20: note = chemically synthesized
  source 1..20: mol_type = other DNA
tgggagagtactctgtgcag

SEQ ID NO: 45966 - DNA, 20 bp, synthetic construct
  misc_feature 1..20: note = chemically synthesized
  source 1..20: mol_type = other DNA
aaacccagttctaatgcacc

SEQ ID NO: 45967 - DNA, 20 bp, synthetic construct
  misc_feature 1..20: note = chemically synthesized
  source 1..20: mol_type = other DNA
gtttctcatgactaaaagaa

SEQ ID NO: 45968 - DNA, 20 bp, synthetic construct
  misc_feature 1..20: note = chemically synthesized
  source 1..20: mol_type = other DNA
cgattcccacaaaataacca

SEQ ID NO: 45969 - DNA, 20 bp, synthetic construct
  misc_feature 1..20: note = chemically synthesized
  source 1..20: mol_type = other DNA
tcccacaaaataaccattga

SEQ ID NO: 45970 - DNA, 20 bp, synthetic construct
  misc_feature 1..20: note = chemically synthesized
  source 1..20: mol_type = other DNA
acaaaataaccattgaatga

SEQ ID NO: 45971 - DNA, 20 bp, synthetic construct
  misc_feature 1..20: note = chemically synthesized
  source 1..20: mol_type = other DNA
gcctctgcttactcacctct

SEQ ID NO: 45972 - DNA, 20 bp, synthetic construct
  misc_feature 1..20: note = chemically synthesized
  source 1..20: mol_type = other DNA
tgcttactcacctctcagga

SEQ ID NO: 45973 - DNA, 20 bp, synthetic construct
  misc_feature 1..20: note = chemically synthesized
  source 1..20: mol_type = other DNA
aggaagagggctatactgag

SEQ ID NO: 45974 - DNA, 20 bp, synthetic construct
  misc_feature 1..20: note = chemically synthesized
  source 1..20: mol_type = other DNA
agaagcgtgggcaggcagct

SEQ ID NO: 45975 - DNA, 20 bp, synthetic construct
  misc_feature 1..20: note = chemically synthesized
  source 1..20: mol_type = other DNA
gggcaggcagctgtgagtgg

SEQ ID NO: 45976 - DNA, 20 bp, synthetic construct
  misc_feature 1..20: note = chemically synthesized
  source 1..20: mol_type = other DNA
agattaggcaatggaggctc

SEQ ID NO: 45977 - DNA, 20 bp, synthetic construct
  misc_feature 1..20: note = chemically synthesized
  source 1..20: mol_type = other DNA
gcctgagggccagaagctgg

SEQ ID NO: 45978 - DNA, 20 bp, synthetic construct
  misc_feature 1..20: note = chemically synthesized
  source 1..20: mol_type = other DNA
tgaggcgccgggctcagctc

SEQ ID NO: 45979 - DNA, 20 bp, synthetic construct
  misc_feature 1..20: note = chemically synthesized
  source 1..20: mol_type = other DNA
caccaagggcccttccctgc

SEQ ID NO: 45980 - DNA, 20 bp, synthetic construct
  misc_feature 1..20: note = chemically synthesized
  source 1..20: mol_type = other DNA
aaaggacgccaatgggcctc

SEQ ID NO: 45981 - DNA, 20 bp, synthetic construct
  misc_feature 1..20: note = chemically synthesized
  source 1..20: mol_type = other DNA
ttttcttcggctgaaacaga

SEQ ID NO: 45982 - DNA, 20 bp, synthetic construct
  misc_feature 1..20: note = chemically synthesized
  source 1..20: mol_type = other DNA
aacagatggaatactagagc

SEQ ID NO: 45983 - DNA, 20 bp, synthetic construct
  misc_feature 1..20: note = chemically synthesized
  source 1..20: mol_type = other DNA
cttcccaccccgcccctgtc

SEQ ID NO: 45984 - DNA, 20 bp, synthetic construct
  misc_feature 1..20: note = chemically synthesized
  source 1..20: mol_type = other DNA
cagaaactgggaaatctggg

SEQ ID NO: 45985 - DNA, 20 bp, synthetic construct
  misc_feature 1..20: note = chemically synthesized
  source 1..20: mol_type = other DNA
tgctcgcccttcctcggcct

SEQ ID NO: 45986 - DNA, 20 bp, synthetic construct
  misc_feature 1..20: note = chemically synthesized
  source 1..20: mol_type = other DNA
caaccccgcgaaccttccca

SEQ ID NO: 45987 - DNA, 20 bp, synthetic construct
  misc_feature 1..20: note = chemically synthesized
  source 1..20: mol_type = other DNA
agcaccgcaccgtcccggct

SEQ ID NO: 45988 - DNA, 20 bp, synthetic construct
  misc_feature 1..20: note = chemically synthesized
  source 1..20: mol_type = other DNA
aggtggctgtggttccgtgc

SEQ ID NO: 45989 - DNA, 20 bp, synthetic construct
  misc_feature 1..20: note = chemically synthesized
  source 1..20: mol_type = other DNA
agggcgcgtgaaggggcgcg

SEQ ID NO: 45990 - DNA, 20 bp, synthetic construct
  misc_feature 1..20: note = chemically synthesized
  source 1..20: mol_type = other DNA
acgtcgctgcggaaaccttc

SEQ ID NO: 45991 - DNA, 20 bp, synthetic construct
  misc_feature 1..20: note = chemically synthesized
  source 1..20: mol_type = other DNA
ctgcggaaaccttctagggt

SEQ ID NO: 45992 - DNA, 20 bp, synthetic construct
  misc_feature 1..20: note = chemically synthesized
  source 1..20: mol_type = other DNA
ttaacggaacccccggactg

SEQ ID NO: 45993 - DNA, 20 bp, synthetic construct
  misc_feature 1..20: note = chemically synthesized
  source 1..20: mol_type = other DNA
ctcccgcctctcaccctgcg

SEQ ID NO: 45994 - DNA, 20 bp, synthetic construct
  misc_feature 1..20: note = chemically synthesized
  source 1..20: mol_type = other DNA
gcccaccttttcagtgtttc

SEQ ID NO: 45995 - DNA, 20 bp, synthetic construct
  misc_feature 1..20: note = chemically synthesized
  source 1..20: mol_type = other DNA
cctgctgaccagtgagactt

SEQ ID NO: 45996 - DNA, 20 bp, synthetic construct
  misc_feature 1..20: note = chemically synthesized
  source 1..20: mol_type = other DNA
tgtggactcctcgctgccca

SEQ ID NO: 45997 - DNA, 20 bp, synthetic construct
  misc_feature 1..20: note = chemically synthesized
  source 1..20: mol_type = other DNA
tccagcctacatgcatttca

SEQ ID NO: 45998 - DNA, 20 bp, synthetic construct
  misc_feature 1..20: note = chemically synthesized
  source 1..20: mol_type = other DNA
agacgtcatataggtacatt

SEQ ID NO: 45999 - DNA, 20 bp, synthetic construct
  misc_feature 1..20: note = chemically synthesized
  source 1..20: mol_type = other DNA
acctattgtgtaccaggcag

SEQ ID NO: 46000 - DNA, 20 bp, synthetic construct
  misc_feature 1..20: note = chemically synthesized
  source 1..20: mol_type = other DNA
gatactgggaagaaacaaag

SEQ ID NO: 46001 - DNA, 20 bp, synthetic construct
  misc_feature 1..20: note = chemically synthesized
  source 1..20: mol_type = other DNA
ttgcagatgcacagcagatt

SEQ ID NO: 46002 - DNA, 20 bp, synthetic construct
  misc_feature 1..20: note = chemically synthesized
  source 1..20: mol_type = other DNA
tccgagtgaaatggcctgct

SEQ ID NO: 46003 - DNA, 20 bp, synthetic construct
  misc_feature 1..20: note = chemically synthesized
  source 1..20: mol_type = other DNA
cctgctctgaatctaggtgc

SEQ ID NO: 46004 - DNA, 20 bp, synthetic construct
  misc_feature 1..20: note = chemically synthesized
  source 1..20: mol_type = other DNA
gcacaaagacagtgcaacca

SEQ ID NO: 46005 - DNA, 20 bp, synthetic construct
  misc_feature 1..20: note = chemically synthesized
  source 1..20: mol_type = other DNA
gtgactccatgaggtaaggt

SEQ ID NO: 46006 - DNA, 20 bp, synthetic construct
  misc_feature 1..20: note = chemically synthesized
  source 1..20: mol_type = other DNA
tcgagcccgccatcgcagca

SEQ ID NO: 46007 - DNA, 20 bp, synthetic construct
  misc_feature 1..20: note = chemically synthesized
  source 1..20: mol_type = other DNA
tccttcctgttgcctgtaat

SEQ ID NO: 46008 - DNA, 20 bp, synthetic construct
  misc_feature 1..20: note = chemically synthesized
  source 1..20: mol_type = other DNA
tcaaaggcctcccctggagc

SEQ ID NO: 46009 - DNA, 20 bp, synthetic construct
  misc_feature 1..20: note = chemically synthesized
  source 1..20: mol_type = other DNA
gaccttggcctctcacctac

SEQ ID NO: 46010 - DNA, 20 bp, synthetic construct
  misc_feature 1..20: note = chemically synthesized
  source 1..20: mol_type = other DNA
tcccagtatcgacagccctt

SEQ ID NO: 46011 - DNA, 20 bp, synthetic construct
  misc_feature 1..20: note = chemically synthesized
  source 1..20: mol_type = other DNA
aagctgagcttgtgcctacc

SEQ ID NO: 46012 - DNA, 20 bp, synthetic construct
  misc_feature 1..20: note = chemically synthesized
  source 1..20: mol_type = other DNA
tgccaggttaaggccagtgg

SEQ ID NO: 46013 - DNA, 20 bp, synthetic construct
  misc_feature 1..20: note = chemically synthesized
  source 1..20: mol_type = other DNA
ctgggaactgcaccaggcac

SEQ ID NO: 46014 - DNA, 20 bp, synthetic construct
  misc_feature 1..20: note = chemically synthesized
  source 1..20: mol_type = other DNA
gtattccatctgtttcagcc

SEQ ID NO: 46015 - DNA, 20 bp, synthetic construct
  misc_feature 1..20: note = chemically synthesized
  source 1..20: mol_type = other DNA
ttgtggggttgtggccagga

SEQ ID NO: 46016 - DNA, 20 bp, synthetic construct
  misc_feature 1..20: note = chemically synthesized
  source 1..20: mol_type = other DNA
ttattttgtgggaatcgaat

SEQ ID NO: 46017 - DNA, 20 bp, synthetic construct
  misc_feature 1..20: note = chemically synthesized
  source 1..20: mol_type = other DNA
atgaaaatattttttggcaa

SEQ ID NO: 46018 - DNA, 20 bp, synthetic construct
  misc_feature 1..20: note = chemically synthesized
  source 1..20: mol_type = other DNA
caatccttttcttttagtca

SEQ ID NO: 46019 - DNA, 20 bp, synthetic construct
  misc_feature 1..20: note = chemically synthesized
  source 1..20: mol_type = other DNA
gttcagcgatgatggtgtca

SEQ ID NO: 46020 - DNA, 20 bp, synthetic construct
  misc_feature 1..20: note = chemically synthesized
  source 1..20: mol_type = other DNA
ccatgcttcctggagagctt

SEQ ID NO: 46021 - DNA, 20 bp, synthetic construct
  misc_feature 1..20: note = chemically synthesized
  source 1..20: mol_type = other DNA
agtaactactggctttctgt

SEQ ID NO: 46022 - DNA, 20 bp, synthetic construct
  misc_feature 1..20: note = chemically synthesized
  source 1..20: mol_type = other DNA
gtcacatcttcggtggaggg

SEQ ID NO: 46023 - DNA, 20 bp, synthetic construct
  misc_feature 1..20: note = chemically synthesized
  source 1..20: mol_type = other DNA
aagcactagggccagggtga

SEQ ID NO: 46024 - DNA, 20 bp, synthetic construct
  misc_feature 1..20: note = chemically synthesized
  source 1..20: mol_type = other DNA
aggcagcagatgcattggca

SEQ ID NO: 46025 - DNA, 20 bp, synthetic construct
  misc_feature 1..20: note = chemically synthesized
  source 1..20: mol_type = other DNA
aggcttaaagggaattctat

SEQ ID NO: 46026 - DNA, 20 bp, synthetic construct
  misc_feature 1..20: note = chemically synthesized
  source 1..20: mol_type = other DNA
aggaggaacatgatgacatg

SEQ ID NO: 46027 - DNA, 20 bp, synthetic construct
  misc_feature 1..20: note = chemically synthesized
  source 1..20: mol_type = other DNA
ccccctcccccatgccccag

SEQ ID NO: 46028 - DNA, 20 bp, synthetic construct
  misc_feature 1..20: note = chemically synthesized
  source 1..20: mol_type = other DNA
aggcaacacttcttaaagag

SEQ ID NO: 46029 - DNA, 20 bp, synthetic construct
  misc_feature 1..20: note = chemically synthesized
  source 1..20: mol_type = other DNA
cctcagaacttgtttggatt

SEQ ID NO: 46030 - DNA, 20 bp, synthetic construct
  misc_feature 1..20: note = chemically synthesized
  source 1..20: mol_type = other DNA
gggcaatcagagtctgcttg

SEQ ID NO: 46031 - DNA, 20 bp, synthetic construct
  misc_feature 1..20: note = chemically synthesized
  source 1..20: mol_type = other DNA
gaaactccatctcaaaaaaa

SEQ ID NO: 46032 - DNA, 20 bp, synthetic construct
  misc_feature 1..20: note = chemically synthesized
  source 1..20: mol_type = other DNA
gttcatggtacctcctaatc

SEQ ID NO: 46033 - DNA, 20 bp, synthetic construct
  misc_feature 1..20: note = chemically synthesized
  source 1..20: mol_type = other DNA
gcctcagtttctcatgacta

SEQ ID NO: 46034 - DNA, 20 bp, synthetic construct
  misc_feature 1..20: note = chemically synthesized
  source 1..20: mol_type = other DNA
tgttccaaacttccaccaga

SEQ ID NO: 46035 - DNA, 20 bp, synthetic construct
  misc_feature 1..20: note = chemically synthesized
  source 1..20: mol_type = other DNA
cacaaccccacaacatccct

SEQ ID NO: 46036 - DNA, 20 bp, synthetic construct
  misc_feature 1..20: note = chemically synthesized
  source 1..20: mol_type = other DNA
tgggcaggcagctgtgagtg

SEQ ID NO: 46037 - DNA, 20 bp, synthetic construct
  misc_feature 1..20: note = chemically synthesized
  source 1..20: mol_type = other DNA
aagtcctgggctggtaatac

SEQ ID NO: 46038 - DNA, 20 bp, synthetic construct
  misc_feature 1..20: note = chemically synthesized
  source 1..20: mol_type = other DNA
taaaggacgccaatgggcct

SEQ ID NO: 46039 - DNA, 20 bp, synthetic construct
  misc_feature 1..20: note = chemically synthesized
  source 1..20: mol_type = other DNA
gagcatgagttctgtgtcat

SEQ ID NO: 46040 - DNA, 20 bp, synthetic construct
  misc_feature 1..20: note = chemically synthesized
  source 1..20: mol_type = other DNA
cccacctgtgccgcggcgag

SEQ ID NO: 46041 - DNA, 20 bp, synthetic construct
  misc_feature 1..20: note = chemically synthesized
  source 1..20: mol_type = other DNA
cgtcagattacgcgcagagg

SEQ ID NO: 46042 - DNA, 20 bp, synthetic construct
  misc_feature 1..20: note = chemically synthesized
  source 1..20: mol_type = other DNA
aagacgtcatataggtacat

SEQ ID NO: 46043 - DNA, 20 bp, synthetic construct
  misc_feature 1..20: note = chemically synthesized
  source 1..20: mol_type = other DNA
ttccttttacacaccatgtt

SEQ ID NO: 46044 - DNA, 20 bp, synthetic construct
  misc_feature 1..20: note = chemically synthesized
  source 1..20: mol_type = other DNA
ggaagggctgtcgatactgg

SEQ ID NO: 46045 - DNA, 20 bp, synthetic construct
  misc_feature 1..20: note = chemically synthesized
  source 1..20: mol_type = other DNA
atcaaaggcctcccctggag

SEQ ID NO: 46046 - DNA, 20 bp, synthetic construct
  misc_feature 1..20: note = chemically synthesized
  source 1..20: mol_type = other DNA
atatgacgtctttgcaaact

SEQ ID NO: 46047 - DNA, 20 bp, synthetic construct
  misc_feature 1..20: note = chemically synthesized
  source 1..20: mol_type = other DNA
gtgggttccgatttggtttg

SEQ ID NO: 46048 - DNA, 20 bp, synthetic construct
  misc_feature 1..20: note = chemically synthesized
  source 1..20: mol_type = other DNA
atttcaagttaccactgctc

SEQ ID NO: 46049 - DNA, 20 bp, synthetic construct
  misc_feature 1..20: note = chemically synthesized
  source 1..20: mol_type = other DNA
gaacaaagatacagagctgg

SEQ ID NO: 46050 - DNA, 20 bp, synthetic construct
  misc_feature 1..20: note = chemically synthesized
  source 1..20: mol_type = other DNA
tctgaaatgtaaaatgttac

SEQ ID NO: 46051 - DNA, 20 bp, synthetic construct
  misc_feature 1..20: note = chemically synthesized
  source 1..20: mol_type = other DNA
tccaaacaagttctgaggtt

SEQ ID NO: 46052 - DNA, 20 bp, synthetic construct
  misc_feature 1..20: note = chemically synthesized
  source 1..20: mol_type = other DNA
agttggagcagacaagagct

SEQ ID NO: 46053 - DNA, 20 bp, synthetic construct
  misc_feature 1..20: note = chemically synthesized
  source 1..20: mol_type = other DNA
agctgggtgcaggtacagag

SEQ ID NO: 46054 - DNA, 20 bp, synthetic construct
  misc_feature 1..20: note = chemically synthesized
  source 1..20: mol_type = other DNA
cctagtgcttcaaatcttaa

SEQ ID NO: 46055 - DNA, 20 bp, synthetic construct
  misc_feature 1..20: note = chemically synthesized
  source 1..20: mol_type = other DNA
ggtggtgcagaagcacaaat

SEQ ID NO: 46056 - DNA, 20 bp, synthetic construct
  misc_feature 1..20: note = chemically synthesized
  source 1..20: mol_type = other DNA
tttacccaaagccttagggc

SEQ ID NO: 46057 - DNA, 20 bp, synthetic construct
  misc_feature 1..20: note = chemically synthesized
  source 1..20: mol_type = other DNA
accatcaaataaatcacaaa

SEQ ID NO: 46058 - DNA, 20 bp, synthetic construct
  misc_feature 1..20: note = chemically synthesized
  source 1..20: mol_type = other DNA
ggtcacactgcagacaggga

SEQ ID NO: 46059 - DNA, 20 bp, synthetic construct
  misc_feature 1..20: note = chemically synthesized
  source 1..20: mol_type = other DNA
gattacgcgcagagggaaga

SEQ ID NO: 46060 - DNA, 20 bp, synthetic construct
  misc_feature 1..20: note = chemically synthesized
  source 1..20: mol_type = other DNA
atcaactttggactccagca

SEQ ID NO: 46061 - DNA, 20 bp, synthetic construct
  misc_feature 1..20: note = chemically synthesized
  source 1..20: mol_type = other DNA
agggaggatcataaattcgc

SEQ ID NO: 46062 - DNA, 20 bp, synthetic construct
  misc_feature 1..20: note = chemically synthesized
  source 1..20: mol_type = other DNA
cctcctgcctggtacacaat

SEQ ID NO: 46063 - DNA, 20 bp, synthetic construct
  misc_feature 1..20: note = chemically synthesized
  source 1..20: mol_type = other DNA
gtacacaataggtgtttact

SEQ ID NO: 46064 - DNA, 20 bp, synthetic construct
  misc_feature 1..20: note = chemically synthesized
  source 1..20: mol_type = other DNA
tgtttactggatgcttgtcc

SEQ ID NO: 46065 - DNA, 20 bp, synthetic construct
  misc_feature 1..20: note = chemically synthesized
  source 1..20: mol_type = other DNA
aaattgaatcttctggaaag

SEQ ID NO: 46066 - DNA, 20 bp, synthetic construct
  misc_feature 1..20: note = chemically synthesized
  source 1..20: mol_type = other DNA
gaggccggagggggtccagg

SEQ ID NO: 46067 - DNA, 20 bp, synthetic construct
  misc_feature 1..20: note = chemically synthesized
  source 1..20: mol_type = other DNA
tgggcagcgaggagtccaca

SEQ ID NO: 46068 - DNA, 20 bp, synthetic construct
  misc_feature 1..20: note = chemically synthesized
  source 1..20: mol_type = other DNA
cagcgaggagtccacagtag

SEQ ID NO: 46069 - DNA, 20 bp, synthetic construct
  misc_feature 1..20: note = chemically synthesized
  source 1..20: mol_type = other DNA
cggcctgccttccagcccag

SEQ ID NO: 46070 - DNA, 20 bp, synthetic construct
  misc_feature 1..20: note = chemically synthesized
  source 1..20: mol_type = other DNA
ttccagcccagttaggattt

SEQ ID NO: 46071 - DNA, 20 bp, synthetic construct
  misc_feature 1..20: note = chemically synthesized
  source 1..20: mol_type = other DNA
tccctctgcgcgtaatctga

SEQ ID NO: 46072 - DNA, 20 bp, synthetic construct
  misc_feature 1..20: note = chemically synthesized
  source 1..20: mol_type = other DNA
ctccagtccgggggttccgt

SEQ ID NO: 46073 - DNA, 20 bp, synthetic construct
  misc_feature 1..20: note = chemically synthesized
  source 1..20: mol_type = other DNA
cgtcaagcacccacacccta

SEQ ID NO: 46074 - DNA, 20 bp, synthetic construct
  misc_feature 1..20: note = chemically synthesized
  source 1..20: mol_type = other DNA
cagcggctcccagctcccag

SEQ ID NO: 46075 - DNA, 20 bp, synthetic construct
  misc_feature 1..20: note = chemically synthesized
  source 1..20: mol_type = other DNA
ccgcagccgggacggtgcgg

SEQ ID NO: 46076 - DNA, 20 bp, synthetic construct
  misc_feature 1..20: note = chemically synthesized
  source 1..20: mol_type = other DNA
ggtgctgtttcctctcgggc

SEQ ID NO: 46077 - DNA, 20 bp, synthetic construct
  misc_feature 1..20: note = chemically synthesized
  source 1..20: mol_type = other DNA
agtgcaggtcgccgagggct

SEQ ID NO: 46078 - DNA, 20 bp, synthetic construct
  misc_feature 1..20: note = chemically synthesized
  source 1..20: mol_type = other DNA
agcactgccaggatatcctg

SEQ ID NO: 46079 - DNA, 20 bp, synthetic construct
  misc_feature 1..20: note = chemically synthesized
  source 1..20: mol_type = other DNA
aggatatcctgcccagattt

SEQ ID NO: 46080 - DNA, 20 bp, synthetic construct
  misc_feature 1..20: note = chemically synthesized
  source 1..20: mol_type = other DNA
ctgcaccaggcacagagaaa

SEQ ID NO: 46081 - DNA, 20 bp, synthetic construct
  misc_feature 1..20: note = chemically synthesized
  source 1..20: mol_type = other DNA
gggcttgccattatagtggg

SEQ ID NO: 46082 - DNA, 20 bp, synthetic construct
  misc_feature 1..20: note = chemically synthesized
  source 1..20: mol_type = other DNA
gccattatagtgggttccga

SEQ ID NO: 46083 - DNA, 20 bp, synthetic construct
  misc_feature 1..20: note = chemically synthesized
  source 1..20: mol_type = other DNA
aactcatgctctagtattcc

SEQ ID NO: 46084 - DNA, 20 bp, synthetic construct
  misc_feature 1..20: note = chemically synthesized
  source 1..20: mol_type = other DNA
gtctgccgaccgtgtgcggg

SEQ ID NO: 46085 - DNA, 20 bp, synthetic construct
  misc_feature 1..20: note = chemically synthesized
  source 1..20: mol_type = other DNA
cgagtttgctcaacaactct

SEQ ID NO: 46086 - DNA, 20 bp, synthetic construct
  misc_feature 1..20: note = chemically synthesized
  source 1..20: mol_type = other DNA
cttctggccctcaggctgtg

SEQ ID NO: 46087 - DNA, 20 bp, synthetic construct
  misc_feature 1..20: note = chemically synthesized
  source 1..20: mol_type = other DNA
cttcttcccggggcgagacc

SEQ ID NO: 46088 - DNA, 20 bp, synthetic construct
  misc_feature 1..20: note = chemically synthesized
  source 1..20: mol_type = other DNA
ttggctgaggttctgtgtcc

SEQ ID NO: 46089 - DNA, 20 bp, synthetic construct
  misc_feature 1..20: note = chemically synthesized
  source 1..20: mol_type = other DNA
agtcagatgtggggttgaat

SEQ ID NO: 46090 - DNA, 20 bp, synthetic construct
  misc_feature 1..20: note = chemically synthesized
  source 1..20: mol_type = other DNA
tggcttcctctcactagctg

SEQ ID NO: 46091 - DNA, 20 bp, synthetic construct
  misc_feature 1..20: note = chemically synthesized
  source 1..20: mol_type = other DNA
caagccccggggggatcact

SEQ ID NO: 46092 - DNA, 20 bp, synthetic construct
  misc_feature 1..20: note = chemically synthesized
  source 1..20: mol_type = other DNA
tgccactcacagctgcctgc

SEQ ID NO: 46093 - DNA, 20 bp, synthetic construct
  misc_feature 1..20: note = chemically synthesized
  source 1..20: mol_type = other DNA
cacctgaaccaagcccttga

SEQ ID NO: 46094 - DNA, 20 bp, synthetic construct
  misc_feature 1..20: note = chemically synthesized
  source 1..20: mol_type = other DNA
gaggatgtttcttctctggt

SEQ ID NO: 46095 - DNA, 20 bp, synthetic construct
  misc_feature 1..20: note = chemically synthesized
  source 1..20: mol_type = other DNA
tcaccccaggtgcattagaa

SEQ ID NO: 46096 - DNA, 20 bp, synthetic construct
  misc_feature 1..20: note = chemically synthesized
  source 1..20: mol_type = other DNA
ggtgtcatgagaattttatt

SEQ ID NO: 46097 - DNA, 20 bp, synthetic construct
  misc_feature 1..20: note = chemically synthesized
  source 1..20: mol_type = other DNA
tttttcttttttttttgaga

SEQ ID NO: 46098 - DNA, 20 bp, synthetic construct
  misc_feature 1..20: note = chemically synthesized
  source 1..20: mol_type = other DNA
tgcctcagcctcccaagaag

SEQ ID NO: 46099 - DNA, 20 bp, synthetic construct
  misc_feature 1..20: note = chemically synthesized
  source 1..20: mol_type = other DNA
ttttgtatttttagtagaga

SEQ ID NO: 46100 - DNA, 20 bp, synthetic construct
  misc_feature 1..20: note = chemically synthesized
  source 1..20: mol_type = other DNA
tgtaaaatgttacgaaaacc

SEQ ID NO: 46101 - DNA, 20 bp, synthetic construct
  misc_feature 1..20: note = chemically synthesized
  source 1..20: mol_type = other DNA
acgaaaaccaaaagtttttt

SEQ ID NO: 46102 - DNA, 20 bp, synthetic construct
  misc_feature 1..20: note = chemically synthesized
  source 1..20: mol_type = other DNA
agcacctgacgtgaactgac

SEQ ID NO: 46103 - DNA, 20 bp, synthetic construct
  misc_feature 1..20: note = chemically synthesized
  source 1..20: mol_type = other DNA
catattcatatattttgctg

SEQ ID NO: 46104 - DNA, 20 bp, synthetic construct
  misc_feature 1..20: note = chemically synthesized
  source 1..20: mol_type = other DNA
catagattacagtatgcagc

SEQ ID NO: 46105 - DNA, 20 bp, synthetic construct
  misc_feature 1..20: note = chemically synthesized
  source 1..20: mol_type = other DNA
tccagattcttccaagcaga

SEQ ID NO: 46106 - DNA, 20 bp, synthetic construct
  misc_feature 1..20: note = chemically synthesized
  source 1..20: mol_type = other DNA
aaacaagttctgaggttcaa

SEQ ID NO: 46107 - DNA, 20 bp, synthetic construct
  misc_feature 1..20: note = chemically synthesized
  source 1..20: mol_type = other DNA
gttcaaaaccgttttggccc

SEQ ID NO: 46108 - DNA, 20 bp, synthetic construct
  misc_feature 1..20: note = chemically synthesized
  source 1..20: mol_type = other DNA
gtaggggccaaggaggagca

SEQ ID NO: 46109 - DNA, 20 bp, synthetic construct
  misc_feature 1..20: note = chemically synthesized
  source 1..20: mol_type = other DNA
aggaggagcatggagtttgg

SEQ ID NO: 46110 - DNA, 20 bp, synthetic construct
  misc_feature 1..20: note = chemically synthesized
  source 1..20: mol_type = other DNA
catagatagtggctgctata

SEQ ID NO: 46111 - DNA, 20 bp, synthetic construct
  misc_feature 1..20: note = chemically synthesized
  source 1..20: mol_type = other DNA
tggaagtggggcctaatggg

SEQ ID NO: 46112 - DNA, 20 bp, synthetic construct
  misc_feature 1..20: note = chemically synthesized
  source 1..20: mol_type = other DNA
atgggggaggaacccctgtg

SEQ ID NO: 46113 - DNA, 20 bp, synthetic construct
  misc_feature 1..20: note = chemically synthesized
  source 1..20: mol_type = other DNA
ataatgagtaagttctcccg

SEQ ID NO: 46114 - DNA, 20 bp, synthetic construct
  misc_feature 1..20: note = chemically synthesized
  source 1..20: mol_type = other DNA
ccgctatgatttcccttgaa

SEQ ID NO: 46115 - DNA, 20 bp, synthetic construct
  misc_feature 1..20: note = chemically synthesized
  source 1..20: mol_type = other DNA
cttgaaggctgattattaaa

SEQ ID NO: 46116 - DNA, 20 bp, synthetic construct
  misc_feature 1..20: note = chemically synthesized
  source 1..20: mol_type = other DNA
tggcacctccctctcttctc

SEQ ID NO: 46117 - DNA, 20 bp, synthetic construct
  misc_feature 1..20: note = chemically synthesized
  source 1..20: mol_type = other DNA
ctcttgcttcttctcttgcc

SEQ ID NO: 46118 - DNA, 20 bp, synthetic construct
  misc_feature 1..20: note = chemically synthesized
  source 1..20: mol_type = other DNA
caccttctgccatcagtgaa

SEQ ID NO: 46119 - DNA, 20 bp, synthetic construct
  misc_feature 1..20: note = chemically synthesized
  source 1..20: mol_type = other DNA
accagaagcagatgctggtg

SEQ ID NO: 46120 - DNA, 20 bp, synthetic construct
  misc_feature 1..20: note = chemically synthesized
  source 1..20: mol_type = other DNA
tgctggtgccatgcttcctg

SEQ ID NO: 46121 - DNA, 20 bp, synthetic construct
  misc_feature 1..20: note = chemically synthesized
  source 1..20: mol_type = other DNA
catttgtagagcatctggat

SEQ ID NO: 46122 - DNA, 20 bp, synthetic construct
  misc_feature 1..20: note = chemically synthesized
  source 1..20: mol_type = other DNA
ttggagctggaattcaggtc

SEQ ID NO: 46123 - DNA, 20 bp, synthetic construct
  misc_feature 1..20: note = chemically synthesized
  source 1..20: mol_type = other DNA
cggtttcctggctccaaagc

SEQ ID NO: 46124 - DNA, 20 bp, synthetic construct
  misc_feature 1..20: note = chemically synthesized
  source 1..20: mol_type = other DNA
tggcctatatgagttcttta

SEQ ID NO: 46125 - DNA, 20 bp, synthetic construct
  misc_feature 1..20: note = chemically synthesized
  source 1..20: mol_type = other DNA
ggggtgagataaagtacacc

SEQ ID NO: 46126 - DNA, 20 bp, synthetic construct
  misc_feature 1..20: note = chemically synthesized
  source 1..20: mol_type = other DNA
taaagtacacctagggtttg

SEQ ID NO: 46127 - DNA, 20 bp, synthetic construct
  misc_feature 1..20: note = chemically synthesized
  source 1..20: mol_type = other DNA
atgtcttccatggccttctt

SEQ ID NO: 46128 - DNA, 20 bp, synthetic construct
  misc_feature 1..20: note = chemically synthesized
  source 1..20: mol_type = other DNA
cactgcatatacactgggga

SEQ ID NO: 46129 - DNA, 20 bp, synthetic construct
  misc_feature 1..20: note = chemically synthesized
  source 1..20: mol_type = other DNA
gggtaccaagcacagtaact

SEQ ID NO: 46130 - DNA, 20 bp, synthetic construct
  misc_feature 1..20: note = chemically synthesized
  source 1..20: mol_type = other DNA
tattctcctcaccctggccc

SEQ ID NO: 46131 - DNA, 20 bp, synthetic construct
  misc_feature 1..20: note = chemically synthesized
  source 1..20: mol_type = other DNA
tagtgcttcaaatcttaaaa

SEQ ID NO: 46132 - DNA, 20 bp, synthetic construct
  misc_feature 1..20: note = chemically synthesized
  source 1..20: mol_type = other DNA
tcttaaaaaaacgtttttat

SEQ ID NO: 46133 - DNA, 20 bp, synthetic construct
  misc_feature 1..20: note = chemically synthesized
  source 1..20: mol_type = other DNA
tggtgcagaagcacaaataa

SEQ ID NO: 46134 - DNA, 20 bp, synthetic construct
  misc_feature 1..20: note = chemically synthesized
  source 1..20: mol_type = other DNA
gcacaaataaaaacgttttt

SEQ ID NO: 46135 - DNA, 20 bp, synthetic construct
  misc_feature 1..20: note = chemically synthesized
  source 1..20: mol_type = other DNA
gggacttcactctggatagc

SEQ ID NO: 46136 - DNA, 20 bp, synthetic construct
  misc_feature 1..20: note = chemically synthesized
  source 1..20: mol_type = other DNA
aggaattttggaccctagag

SEQ ID NO: 46137 - DNA, 20 bp, synthetic construct
  misc_feature 1..20: note = chemically synthesized
  source 1..20: mol_type = other DNA
catcccagggccttgtccct

SEQ ID NO: 46138 - DNA, 20 bp, synthetic construct
  misc_feature 1..20: note = chemically synthesized
  source 1..20: mol_type = other DNA
aatggctggcaggcagacca

SEQ ID NO: 46139 - DNA, 20 bp, synthetic construct
  misc_feature 1..20: note = chemically synthesized
  source 1..20: mol_type = other DNA
gacgtaccactggggcatgg

SEQ ID NO: 46140 - DNA, 20 bp, synthetic construct
  misc_feature 1..20: note = chemically synthesized
  source 1..20: mol_type = other DNA
atacagaaagccagtagtta

SEQ ID NO: 46141 - DNA, 20 bp, synthetic construct
  misc_feature 1..20: note = chemically synthesized
  source 1..20: mol_type = other DNA
aatacatacttgctgtcccc

SEQ ID NO: 46142 - DNA, 20 bp, synthetic construct
  misc_feature 1..20: note = chemically synthesized
  source 1..20: mol_type = other DNA
actacgggccacactcgaca

SEQ ID NO: 46143 - DNA, 20 bp, synthetic construct
  misc_feature 1..20: note = chemically synthesized
  source 1..20: mol_type = other DNA
ataaattgagggaaaaaatc

SEQ ID NO: 46144 - DNA, 20 bp, synthetic construct
  misc_feature 1..20: note = chemically synthesized
  source 1..20: mol_type = other DNA
ggtgagtaatttacaaggaa

SEQ ID NO: 46145 - DNA, 20 bp, synthetic construct
  misc_feature 1..20: note = chemically synthesized
  source 1..20: mol_type = other DNA
ggaaaagggatttattcagc

SEQ ID NO: 46146 - DNA, 20 bp, synthetic construct
  misc_feature 1..20: note = chemically synthesized
  source 1..20: mol_type = other DNA
ccaggaagcatggcaccagc

SEQ ID NO: 46147 - DNA, 20 bp, synthetic construct
  misc_feature 1..20: note = chemically synthesized
  source 1..20: mol_type = other DNA
tgcttctggtgagggcctta

SEQ ID NO: 46148 - DNA, 20 bp, synthetic construct
  misc_feature 1..20: note = chemically synthesized
  source 1..20: mol_type = other DNA
actgaggaccaaatttccac

SEQ ID NO: 46149 - DNA, 20 bp, synthetic construct
  misc_feature 1..20: note = chemically synthesized
  source 1..20: mol_type = other DNA
attatagcagccactatcta

SEQ ID NO: 46150 - DNA, 20 bp, synthetic construct
  misc_feature 1..20: note = chemically synthesized
  source 1..20: mol_type = other DNA
agcagccactatctatggtg

SEQ ID NO: 46151 - DNA, 20 bp, synthetic construct
  misc_feature 1..20: note = chemically synthesized
  source 1..20: mol_type = other DNA
ccactatctatggtgatttg

SEQ ID NO: 46152 - DNA, 20 bp, synthetic construct
  misc_feature 1..20: note = chemically synthesized
  source 1..20: mol_type = other DNA
aactgctctcaggcagacat

SEQ ID NO: 46153 - DNA, 20 bp, synthetic construct
  misc_feature 1..20: note = chemically synthesized
  source 1..20: mol_type = other DNA
acccaaagccttagggccaa

SEQ ID NO: 46154 - DNA, 20 bp, synthetic construct
  misc_feature 1..20: note = chemically synthesized
  source 1..20: mol_type = other DNA
aaacggttttgaacctcaga

SEQ ID NO: 46155 - DNA, 20 bp, synthetic construct
  misc_feature 1..20: note = chemically synthesized
  source 1..20: mol_type = other DNA
gttttgaacctcagaacttg

SEQ ID NO: 46156 - DNA, 20 bp, synthetic construct
  misc_feature 1..20: note = chemically synthesized
  source 1..20: mol_type = other DNA
ggcagtaatgggcaatcaga

SEQ ID NO: 46157 - DNA, 20 bp, synthetic construct
  misc_feature 1..20: note = chemically synthesized
  source 1..20: mol_type = other DNA
aataaatcacaaaaaaaact

SEQ ID NO: 46158 - DNA, 20 bp, synthetic construct
  misc_feature 1..20: note = chemically synthesized
  source 1..20: mol_type = other DNA
tcggatccactgaggaggtc

SEQ ID NO: 46159 - DNA, 20 bp, synthetic construct
  misc_feature 1..20: note = chemically synthesized
  source 1..20: mol_type = other DNA
tggtggcaggtacctgtaat

SEQ ID NO: 46160 - DNA, 20 bp, synthetic construct
  misc_feature 1..20: note = chemically synthesized
  source 1..20: mol_type = other DNA
tgtgctccttatcttccacc

SEQ ID NO: 46161 - DNA, 20 bp, synthetic construct
  misc_feature 1..20: note = chemically synthesized
  source 1..20: mol_type = other DNA
catcatcgctgaactcctac

SEQ ID NO: 46162 - DNA, 20 bp, synthetic construct
  misc_feature 1..20: note = chemically synthesized
  source 1..20: mol_type = other DNA
gtgacctcctctctctgggc

SEQ ID NO: 46163 - DNA, 20 bp, synthetic construct
  misc_feature 1..20: note = chemically synthesized
  source 1..20: mol_type = other DNA
agtttctcatgactaaaaga

SEQ ID NO: 46164 - DNA, 20 bp, synthetic construct
  misc_feature 1..20: note = chemically synthesized
  source 1..20: mol_type = other DNA
ggattggtctaaaaattatt

SEQ ID NO: 46165 - DNA, 20 bp, synthetic construct
  misc_feature 1..20: note = chemically synthesized
  source 1..20: mol_type = other DNA
aaaaaatattttcattctaa

SEQ ID NO: 46166 - DNA, 20 bp, synthetic construct
  misc_feature 1..20: note = chemically synthesized
  source 1..20: mol_type = other DNA
accagagaagaaacatcctc

SEQ ID NO: 46167 - DNA, 20 bp, synthetic construct
  misc_feature 1..20: note = chemically synthesized
  source 1..20: mol_type = other DNA
ggttcaggtggtcatacagc

SEQ ID NO: 46168 - DNA, 20 bp, synthetic construct
  misc_feature 1..20: note = chemically synthesized
  source 1..20: mol_type = other DNA
gtactcactatttccagaac

SEQ ID NO: 46169 - DNA, 20 bp, synthetic construct
  misc_feature 1..20: note = chemically synthesized
  source 1..20: mol_type = other DNA
ttcccctctgccccaggagc

SEQ ID NO: 46170 - DNA, 20 bp, synthetic construct
  misc_feature 1..20: note = chemically synthesized
  source 1..20: mol_type = other DNA
aaaactgcaagtgatccccc

SEQ ID NO: 46171 - DNA, 20 bp, synthetic construct
  misc_feature 1..20: note = chemically synthesized
  source 1..20: mol_type = other DNA
ctgctgccactgagccgtag

SEQ ID NO: 46172 - DNA, 20 bp, synthetic construct
  misc_feature 1..20: note = chemically synthesized
  source 1..20: mol_type = other DNA
gacgattgtcacctcccttt

SEQ ID NO: 46173 - DNA, 20 bp, synthetic construct
  misc_feature 1..20: note = chemically synthesized
  source 1..20: mol_type = other DNA
ccacagctagtgagaggaag

SEQ ID NO: 46174 - DNA, 20 bp, synthetic construct
  misc_feature 1..20: note = chemically synthesized
  source 1..20: mol_type = other DNA
ctagtggtctcgccccggga

SEQ ID NO: 46175 - DNA, 20 bp, synthetic construct
  misc_feature 1..20: note = chemically synthesized
  source 1..20: mol_type = other DNA
ggccctccaccctccgctgc

SEQ ID NO: 46176 - DNA, 20 bp, synthetic construct
  misc_feature 1..20: note = chemically synthesized
  source 1..20: mol_type = other DNA
ggaacccactataatggcaa

SEQ ID NO: 46177 - DNA, 20 bp, synthetic construct
  misc_feature 1..20: note = chemically synthesized
  source 1..20: mol_type = other DNA
gtggctgtggttccgtgctc

SEQ ID NO: 46178 - DNA, 20 bp, synthetic construct
  misc_feature 1..20: note = chemically synthesized
  source 1..20: mol_type = other DNA
gcggaaaccttctagggtgt

SEQ ID NO: 46179 - DNA, 20 bp, synthetic construct
  misc_feature 1..20: note = chemically synthesized
  source 1..20: mol_type = other DNA
gagccccatcggacgatcct

SEQ ID NO: 46180 - DNA, 20 bp, synthetic construct
  misc_feature 1..20: note = chemically synthesized
  source 1..20: mol_type = other DNA
ggaacccccggactggagga

SEQ ID NO: 46181 - DNA, 20 bp, synthetic construct
  misc_feature 1..20: note = chemically synthesized
  source 1..20: mol_type = other DNA
cctcgccctccccaaacagc

SEQ ID NO: 46182 - DNA, 20 bp, synthetic construct
  misc_feature 1..20: note = chemically synthesized
  source 1..20: mol_type = other DNA
ttctgccgggcccacctttt

SEQ ID NO: 46183 - DNA, 20 bp, synthetic construct
  misc_feature 1..20: note = chemically synthesized
  source 1..20: mol_type = other DNA
taccaactagctgctccttg

SEQ ID NO: 46184 - DNA, 20 bp, synthetic construct
  misc_feature 1..20: note = chemically synthesized
  source 1..20: mol_type = other DNA
aactagctgctccttgaaga

SEQ ID NO: 46185 - DNA, 20 bp, synthetic construct
  misc_feature 1..20: note = chemically synthesized
  source 1..20: mol_type = other DNA
agctgctccttgaagagatt

SEQ ID NO: 46186 - DNA, 20 bp, synthetic construct
  misc_feature 1..20: note = chemically synthesized
  source 1..20: mol_type = other DNA
gtccagcctacatgcatttc

SEQ ID NO: 46187 - DNA, 20 bp, synthetic construct
  misc_feature 1..20: note = chemically synthesized
  source 1..20: mol_type = other DNA
atttcaagggatttatacta

SEQ ID NO: 46188 - DNA, 20 bp, synthetic construct
  misc_feature 1..20: note = chemically synthesized
  source 1..20: mol_type = other DNA
gggatttatactacaaagat

SEQ ID NO: 46189 - DNA, 20 bp, synthetic construct
  misc_feature 1..20: note = chemically synthesized
  source 1..20: mol_type = other DNA
atactacaaagattcaggtt

SEQ ID NO: 46190 - DNA, 20 bp, synthetic construct
  misc_feature 1..20: note = chemically synthesized
  source 1..20: mol_type = other DNA
aattctatggtaggcacaag

SEQ ID NO: 46191 - DNA, 20 bp, synthetic construct
  misc_feature 1..20: note = chemically synthesized
  source 1..20: mol_type = other DNA
aggcacaagctcagctttcc

SEQ ID NO: 46192 - DNA, 20 bp, synthetic construct
  misc_feature 1..20: note = chemically synthesized
  source 1..20: mol_type = other DNA
tttccagaagattcaatttg

SEQ ID NO: 46193 - DNA, 20 bp, synthetic construct
  misc_feature 1..20: note = chemically synthesized
  source 1..20: mol_type = other DNA
ggggaaagagagctcctggc

SEQ ID NO: 46194 - DNA, 20 bp, synthetic construct
  misc_feature 1..20: note = chemically synthesized
  source 1..20: mol_type = other DNA
attgtacatgtggcatgaca

SEQ ID NO: 46195 - DNA, 20 bp, synthetic construct
  misc_feature 1..20: note = chemically synthesized
  source 1..20: mol_type = other DNA
atcctcccttgcagatgcac

SEQ ID NO: 46196 - DNA, 20 bp, synthetic construct
  misc_feature 1..20: note = chemically synthesized
  source 1..20: mol_type = other DNA
caaagttgatgctctttcca

SEQ ID NO: 46197 - DNA, 20 bp, synthetic construct
  misc_feature 1..20: note = chemically synthesized
  source 1..20: mol_type = other DNA
cgcagcacagagtaggagct

SEQ ID NO: 46198 - DNA, 20 bp, synthetic construct
  misc_feature 1..20: note = chemically synthesized
  source 1..20: mol_type = other DNA
taattggaattgtatttgca

SEQ ID NO: 46199 - DNA, 20 bp, synthetic construct
  misc_feature 1..20: note = chemically synthesized
  source 1..20: mol_type = other DNA
tgtatttgcaatgtgctttt

SEQ ID NO: 46200 - DNA, 22 bp, synthetic construct
  misc_feature 1..22: note = chemically synthesized
  source 1..22: mol_type = other DNA
gctcccatctattcttgctcca

SEQ ID NO: 46201 - DNA, 22 bp, synthetic construct
  misc_feature 1..22: note = chemically synthesized
  source 1..22: mol_type = other DNA
ccatctattcttgctccagggg

SEQ ID NO: 46202 - DNA, 22 bp, synthetic construct
  misc_feature 1..22: note = chemically synthesized
  source 1..22: mol_type = other DNA
ttcttgctccaggggaggcctt

SEQ ID NO: 46203 - DNA, 22 bp, synthetic construct
  misc_feature 1..22: note = chemically synthesized
  source 1..22: mol_type = other DNA
ttgctccaggggaggcctttga

SEQ ID NO: 46204 - DNA, 22 bp, synthetic construct
  misc_feature 1..22: note = chemically synthesized
  source 1..22: mol_type = other DNA
gctccaggggaggcctttgatg

SEQ ID NO: 46205 - DNA, 22 bp, synthetic construct
  misc_feature 1..22: note = chemically synthesized
  source 1..22: mol_type = other DNA
ctccaggggaggcctttgatga

SEQ ID NO: 46206 - DNA, 22 bp, synthetic construct
  misc_feature 1..22: note = chemically synthesized
  source 1..22: mol_type = other DNA
caggggaggcctttgatgagga

SEQ ID NO: 46207 - DNA, 22 bp, synthetic construct
  misc_feature 1..22: note = chemically synthesized
  source 1..22: mol_type = other DNA
tgatgaggaagctgccaaaagc

SEQ ID NO: 46208 - DNA, 22 bp, synthetic construct
  misc_feature 1..22: note = chemically synthesized
  source 1..22: mol_type = other DNA
gatgaggaagctgccaaaagca

SEQ ID NO: 46209 - DNA, 22 bp, synthetic construct
  misc_feature 1..22: note = chemically synthesized
  source 1..22: mol_type = other DNA
atgaggaagctgccaaaagcac

SEQ ID NO: 46210 - DNA, 22 bp, synthetic construct
  misc_feature 1..22: note = chemically synthesized
  source 1..22: mol_type = other DNA
ccaaaagcacattgcaaataca

SEQ ID NO: 46211 - DNA, 22 bp, synthetic construct
  misc_feature 1..22: note = chemically synthesized
  source 1..22: mol_type = other DNA
caaatacaattccaattacagg

SEQ ID NO: 46212 - DNA, 22 bp, synthetic construct
  misc_feature 1..22: note = chemically synthesized
  source 1..22: mol_type = other DNA
caattacaggcaacaggaagga

SEQ ID NO: 46213 - DNA, 22 bp, synthetic construct
  misc_feature 1..22: note = chemically synthesized
  source 1..22: mol_type = other DNA
caggcaacaggaaggagaacca

SEQ ID NO: 46214 - DNA, 22 bp, synthetic construct
  misc_feature 1..22: note = chemically synthesized
  source 1..22: mol_type = other DNA
tgccacctctgtcagcaaacca

SEQ ID NO: 46215 - DNA, 22 bp, synthetic construct
  misc_feature 1..22: note = chemically synthesized
  source 1..22: mol_type = other DNA
ccacctctgtcagcaaaccatg

SEQ ID NO: 46216 - DNA, 22 bp, synthetic construct
  misc_feature 1..22: note = chemically synthesized
  source 1..22: mol_type = other DNA
tgtcagcaaaccatgagctcct

SEQ ID NO: 46217 - DNA, 22 bp, synthetic construct
  misc_feature 1..22: note = chemically synthesized
  source 1..22: mol_type = other DNA
tcagcaaaccatgagctcctac

SEQ ID NO: 46218 - DNA, 22 bp, synthetic construct
  misc_feature 1..22: note = chemically synthesized
  source 1..22: mol_type = other DNA
ctactctgtgctgcgatggcgg

SEQ ID NO: 46219 - DNA, 22 bp, synthetic construct
  misc_feature 1..22: note = chemically synthesized
  source 1..22: mol_type = other DNA
ctctgtgctgcgatggcgggct

SEQ ID NO: 46220 - DNA, 22 bp, synthetic construct
  misc_feature 1..22: note = chemically synthesized
  source 1..22: mol_type = other DNA
tgtgctgcgatggcgggctcga

SEQ ID NO: 46221 - DNA, 22 bp, synthetic construct
  misc_feature 1..22: note = chemically synthesized
  source 1..22: mol_type = other DNA
tgctgcgatggcgggctcgatg

SEQ ID NO: 46222 - DNA, 22 bp, synthetic construct
  misc_feature 1..22: note = chemically synthesized
  source 1..22: mol_type = other DNA
cgatggcgggctcgatggggat

SEQ ID NO: 46223 - DNA, 22 bp, synthetic construct
  misc_feature 1..22: note = chemically synthesized
  source 1..22: mol_type = other DNA
gatggggataactctgacctta

SEQ ID NO: 46224 - DNA, 22 bp, synthetic construct
  misc_feature 1..22: note = chemically synthesized
  source 1..22: mol_type = other DNA
tgaccttacctcatggagtcac

SEQ ID NO: 46225 - DNA, 22 bp, synthetic construct
  misc_feature 1..22: note = chemically synthesized
  source 1..22: mol_type = other DNA
accttacctcatggagtcactg

SEQ ID NO: 46226 - DNA, 22 bp, synthetic construct
  misc_feature 1..22: note = chemically synthesized
  source 1..22: mol_type = other DNA
acctcatggagtcactgtcaac

SEQ ID NO: 46227 - DNA, 22 bp, synthetic construct
  misc_feature 1..22: note = chemically synthesized
  source 1..22: mol_type = other DNA
cctcatggagtcactgtcaacc

SEQ ID NO: 46228 - DNA, 22 bp, synthetic construct
  misc_feature 1..22: note = chemically synthesized
  source 1..22: mol_type = other DNA
atggagtcactgtcaacccact

SEQ ID NO: 46229 - DNA, 22 bp, synthetic construct
  misc_feature 1..22: note = chemically synthesized
  source 1..22: mol_type = other DNA
tcaacccactggttgcactgtc

SEQ ID NO: 46230 - DNA, 22 bp, synthetic construct
  misc_feature 1..22: note = chemically synthesized
  source 1..22: mol_type = other DNA
gttgcactgtctttgtgcactg

SEQ ID NO: 46231 - DNA, 22 bp, synthetic construct
  misc_feature 1..22: note = chemically synthesized
  source 1..22: mol_type = other DNA
cactgtctttgtgcactggctc

SEQ ID NO: 46232 - DNA, 22 bp, synthetic construct
  misc_feature 1..22: note = chemically synthesized
  source 1..22: mol_type = other DNA
tctttgtgcactggctctctgg

SEQ ID NO: 46233 - DNA, 22 bp, synthetic construct
  misc_feature 1..22: note = chemically synthesized
  source 1..22: mol_type = other DNA
tgtgcactggctctctggagtg

SEQ ID NO: 46234 - DNA, 22 bp, synthetic construct
  misc_feature 1..22: note = chemically synthesized
  source 1..22: mol_type = other DNA
gtgcactggctctctggagtga

SEQ ID NO: 46235 - DNA, 22 bp, synthetic construct
  misc_feature 1..22: note = chemically synthesized
  source 1..22: mol_type = other DNA
tgcactggctctctggagtgag

SEQ ID NO: 46236 - DNA, 22 bp, synthetic construct
  misc_feature 1..22: note = chemically synthesized
  source 1..22: mol_type = other DNA
gctctctggagtgaggtctttg

SEQ ID NO: 46237 - DNA, 22 bp, synthetic construct
  misc_feature 1..22: note = chemically synthesized
  source 1..22: mol_type = other DNA
tctggagtgaggtctttgcaaa

SEQ ID NO: 46238 - DNA, 22 bp, synthetic construct
  misc_feature 1..22: note = chemically synthesized
  source 1..22: mol_type = other DNA
tggagtgaggtctttgcaaaca

SEQ ID NO: 46239 - DNA, 22 bp, synthetic construct
  misc_feature 1..22: note = chemically synthesized
  source 1..22: mol_type = other DNA
gagtgaggtctttgcaaacaaa

SEQ ID NO: 46240 - DNA, 22 bp, synthetic construct
  misc_feature 1..22: note = chemically synthesized
  source 1..22: mol_type = other DNA
tgcaaacaaagtggaaagagca

SEQ ID NO: 46241 - DNA, 22 bp, synthetic construct
  misc_feature 1..22: note = chemically synthesized
  source 1..22: mol_type = other DNA
gcaaacaaagtggaaagagcat

SEQ ID NO: 46242 - DNA, 22 bp, synthetic construct
  misc_feature 1..22: note = chemically synthesized
  source 1..22: mol_type = other DNA
caaacaaagtggaaagagcatc

SEQ ID NO: 46243 - DNA, 22 bp, synthetic construct
  misc_feature 1..22: note = chemically synthesized
  source 1..22: mol_type = other DNA
tggactccagcacctagattca

SEQ ID NO: 46244 - DNA, 22 bp, synthetic construct
  misc_feature 1..22: note = chemically synthesized
  source 1..22: mol_type = other DNA
ggactccagcacctagattcag

SEQ ID NO: 46245 - DNA, 22 bp, synthetic construct
  misc_feature 1..22: note = chemically synthesized
  source 1..22: mol_type = other DNA
gactccagcacctagattcaga

SEQ ID NO: 46246 - DNA, 22 bp, synthetic construct
  misc_feature 1..22: note = chemically synthesized
  source 1..22: mol_type = other DNA
cagcacctagattcagagcagg

SEQ ID NO: 46247 - DNA, 22 bp, synthetic construct
  misc_feature 1..22: note = chemically synthesized
  source 1..22: mol_type = other DNA
gattcagagcaggccatttcac

SEQ ID NO: 46248 - DNA, 22 bp, synthetic construct
  misc_feature 1..22: note = chemically synthesized
  source 1..22: mol_type = other DNA
agagcaggccatttcactcgga

SEQ ID NO: 46249 - DNA, 22 bp, synthetic construct
  misc_feature 1..22: note = chemically synthesized
  source 1..22: mol_type = other DNA
cactcggaatctgctgtgcatc

SEQ ID NO: 46250 - DNA, 22 bp, synthetic construct
  misc_feature 1..22: note = chemically synthesized
  source 1..22: mol_type = other DNA
actcggaatctgctgtgcatct

SEQ ID NO: 46251 - DNA, 22 bp, synthetic construct
  misc_feature 1..22: note = chemically synthesized
  source 1..22: mol_type = other DNA
ggaatctgctgtgcatctgcaa

SEQ ID NO: 46252 - DNA, 22 bp, synthetic construct
  misc_feature 1..22: note = chemically synthesized
  source 1..22: mol_type = other DNA
ctgtgcatctgcaagggaggat

SEQ ID NO: 46253 - DNA, 22 bp, synthetic construct
  misc_feature 1..22: note = chemically synthesized
  source 1..22: mol_type = other DNA
tgcatctgcaagggaggatcat

SEQ ID NO: 46254 - DNA, 22 bp, synthetic construct
  misc_feature 1..22: note = chemically synthesized
  source 1..22: mol_type = other DNA
caagggaggatcataaattcgc

SEQ ID NO: 46255 - DNA, 22 bp, synthetic construct
  misc_feature 1..22: note = chemically synthesized
  source 1..22: mol_type = other DNA
gcctttgtttcttcccagtatc

SEQ ID NO: 46256 - DNA, 22 bp, synthetic construct
  misc_feature 1..22: note = chemically synthesized
  source 1..22: mol_type = other DNA
tgtttcttcccagtatcgacag

SEQ ID NO: 46257 - DNA, 22 bp, synthetic construct
  misc_feature 1..22: note = chemically synthesized
  source 1..22: mol_type = other DNA
gtttcttcccagtatcgacagc

SEQ ID NO: 46258 - DNA, 22 bp, synthetic construct
  misc_feature 1..22: note = chemically synthesized
  source 1..22: mol_type = other DNA
tttcttcccagtatcgacagcc

SEQ ID NO: 46259 - DNA, 22 bp, synthetic construct
  misc_feature 1..22: note = chemically synthesized
  source 1..22: mol_type = other DNA
cttcccagtatcgacagccctt

SEQ ID NO: 46260 - DNA, 22 bp, synthetic construct
  misc_feature 1..22: note = chemically synthesized
  source 1..22: mol_type = other DNA
ttcccagtatcgacagcccttc

SEQ ID NO: 46261 - DNA, 22 bp, synthetic construct
  misc_feature 1..22: note = chemically synthesized
  source 1..22: mol_type = other DNA
cccagtatcgacagcccttcca

SEQ ID NO: 46262 - DNA, 22 bp, synthetic construct
  misc_feature 1..22: note = chemically synthesized
  source 1..22: mol_type = other DNA
ccagtatcgacagcccttccag

SEQ ID NO: 46263 - DNA, 22 bp, synthetic construct
  misc_feature 1..22: note = chemically synthesized
  source 1..22: mol_type = other DNA
ccagaaagagcaagcctcatgt

SEQ ID NO: 46264 - DNA, 22 bp, synthetic construct
  misc_feature 1..22: note = chemically synthesized
  source 1..22: mol_type = other DNA
cagaaagagcaagcctcatgtc

SEQ ID NO: 46265 - DNA, 22 bp, synthetic construct
  misc_feature 1..22: note = chemically synthesized
  source 1..22: mol_type = other DNA
atgtcatgccacatgtacaatc

SEQ ID NO: 46266 - DNA, 22 bp, synthetic construct
  misc_feature 1..22: note = chemically synthesized
  source 1..22: mol_type = other DNA
aggccaggagctctctttcccc

SEQ ID NO: 46267 - DNA, 22 bp, synthetic construct
  misc_feature 1..22: note = chemically synthesized
  source 1..22: mol_type = other DNA
tctttccccttttcatcctcct

SEQ ID NO: 46268 - DNA, 22 bp, synthetic construct
  misc_feature 1..22: note = chemically synthesized
  source 1..22: mol_type = other DNA
tttccccttttcatcctcctgc

SEQ ID NO: 46269 - DNA, 22 bp, synthetic construct
  misc_feature 1..22: note = chemically synthesized
  source 1..22: mol_type = other DNA
tccccttttcatcctcctgcct

SEQ ID NO: 46270 - DNA, 22 bp, synthetic construct
  misc_feature 1..22: note = chemically synthesized
  source 1..22: mol_type = other DNA
ccccttttcatcctcctgcctg

SEQ ID NO: 46271 - DNA, 22 bp, synthetic construct
  misc_feature 1..22: note = chemically synthesized
  source 1..22: mol_type = other DNA
cccttttcatcctcctgcctgg

SEQ ID NO: 46272 - DNA, 22 bp, synthetic construct
  misc_feature 1..22: note = chemically synthesized
  source 1..22: mol_type = other DNA
ttcatcctcctgcctggtacac

SEQ ID NO: 46273 - DNA, 22 bp, synthetic construct
  misc_feature 1..22: note = chemically synthesized
  source 1..22: mol_type = other DNA
tcatcctcctgcctggtacaca

SEQ ID NO: 46274 - DNA, 22 bp, synthetic construct
  misc_feature 1..22: note = chemically synthesized
  source 1..22: mol_type = other DNA
catcctcctgcctggtacacaa

SEQ ID NO: 46275 - DNA, 22 bp, synthetic construct
  misc_feature 1..22: note = chemically synthesized
  source 1..22: mol_type = other DNA
atcctcctgcctggtacacaat

SEQ ID NO: 46276 - DNA, 22 bp, synthetic construct
  misc_feature 1..22: note = chemically synthesized
  source 1..22: mol_type = other DNA
ctgcctggtacacaataggtgt

SEQ ID NO: 46277 - DNA, 22 bp, synthetic construct
  misc_feature 1..22: note = chemically synthesized
  source 1..22: mol_type = other DNA
cctggtacacaataggtgttta

SEQ ID NO: 46278 - DNA, 22 bp, synthetic construct
  misc_feature 1..22: note = chemically synthesized
  source 1..22: mol_type = other DNA
gtacacaataggtgtttactgg

SEQ ID NO: 46279 - DNA, 22 bp, synthetic construct
  misc_feature 1..22: note = chemically synthesized
  source 1..22: mol_type = other DNA
actggatgcttgtccagttgat

SEQ ID NO: 46280 - DNA, 22 bp, synthetic construct
  misc_feature 1..22: note = chemically synthesized
  source 1..22: mol_type = other DNA
ctggatgcttgtccagttgatt

SEQ ID NO: 46281 - DNA, 22 bp, synthetic construct
  misc_feature 1..22: note = chemically synthesized
  source 1..22: mol_type = other DNA
gatgcttgtccagttgatttct

SEQ ID NO: 46282 - DNA, 22 bp, synthetic construct
  misc_feature 1..22: note = chemically synthesized
  source 1..22: mol_type = other DNA
gtccagttgatttcttgaacat

SEQ ID NO: 46283 - DNA, 22 bp, synthetic construct
  misc_feature 1..22: note = chemically synthesized
  source 1..22: mol_type = other DNA
tccagttgatttcttgaacatg

SEQ ID NO: 46284 - DNA, 22 bp, synthetic construct
  misc_feature 1..22: note = chemically synthesized
  source 1..22: mol_type = other DNA
atttcttgaacatggtgtgtaa

SEQ ID NO: 46285 - DNA, 22 bp, synthetic construct
  misc_feature 1..22: note = chemically synthesized
  source 1..22: mol_type = other DNA
cttgaacatggtgtgtaaaagg

SEQ ID NO: 46286 - DNA, 22 bp, synthetic construct
  misc_feature 1..22: note = chemically synthesized
  source 1..22: mol_type = other DNA
ttgaacatggtgtgtaaaagga

SEQ ID NO: 46287 - DNA, 22 bp, synthetic construct
  misc_feature 1..22: note = chemically synthesized
  source 1..22: mol_type = other DNA
gaacatggtgtgtaaaaggaat

SEQ ID NO: 46288 - DNA, 22 bp, synthetic construct
  misc_feature 1..22: note = chemically synthesized
  source 1..22: mol_type = other DNA
aacatggtgtgtaaaaggaatc

SEQ ID NO: 46289 - DNA, 22 bp, synthetic construct
  misc_feature 1..22: note = chemically synthesized
  source 1..22: mol_type = other DNA
tgcaaattgaatcttctggaaa

SEQ ID NO: 46290 - DNA, 22 bp, synthetic construct
  misc_feature 1..22: note = chemically synthesized
  source 1..22: mol_type = other DNA
gcaaattgaatcttctggaaag

SEQ ID NO: 46291 - DNA, 22 bp, synthetic construct
  misc_feature 1..22: note = chemically synthesized
  source 1..22: mol_type = other DNA
caaattgaatcttctggaaagc

SEQ ID NO: 46292 - DNA, 22 bp, synthetic construct
  misc_feature 1..22: note = chemically synthesized
  source 1..22: mol_type = other DNA
aatcttctggaaagctgagctt

SEQ ID NO: 46293 - DNA, 22 bp, synthetic construct
  misc_feature 1..22: note = chemically synthesized
  source 1..22: mol_type = other DNA
ctggaaagctgagcttgtgcct

SEQ ID NO: 46294 - DNA, 22 bp, synthetic construct
  misc_feature 1..22: note = chemically synthesized
  source 1..22: mol_type = other DNA
tggaaagctgagcttgtgccta

SEQ ID NO: 46295 - DNA, 22 bp, synthetic construct
  misc_feature 1..22: note = chemically synthesized
  source 1..22: mol_type = other DNA
gaaagctgagcttgtgcctacc

SEQ ID NO: 46296 - DNA, 22 bp, synthetic construct
  misc_feature 1..22: note = chemically synthesized
  source 1..22: mol_type = other DNA
agcttgtgcctaccatagaatt

SEQ ID NO: 46297 - DNA, 22 bp, synthetic construct
  misc_feature 1..22: note = chemically synthesized
  source 1..22: mol_type = other DNA
gtgcctaccatagaattctgaa

SEQ ID NO: 46298 - DNA, 22 bp, synthetic construct
  misc_feature 1..22: note = chemically synthesized
  source 1..22: mol_type = other DNA
tgcctaccatagaattctgaat

SEQ ID NO: 46299 - DNA, 22 bp, synthetic construct
  misc_feature 1..22: note = chemically synthesized
  source 1..22: mol_type = other DNA
ccatagaattctgaatgtacct

SEQ ID NO: 46300 - DNA, 22 bp, synthetic construct
  misc_feature 1..22: note = chemically synthesized
  source 1..22: mol_type = other DNA
tgaatgtacctatatgacgtct

SEQ ID NO: 46301 - DNA, 22 bp, synthetic construct
  misc_feature 1..22: note = chemically synthesized
  source 1..22: mol_type = other DNA
aatgtacctatatgacgtcttt

SEQ ID NO: 46302 - DNA, 22 bp, synthetic construct
  misc_feature 1..22: note = chemically synthesized
  source 1..22: mol_type = other DNA
tatgacgtctttgcaaacttaa

SEQ ID NO: 46303 - DNA, 22 bp, synthetic construct
  misc_feature 1..22: note = chemically synthesized
  source 1..22: mol_type = other DNA
tgcaaacttaaaacctgaatct

SEQ ID NO: 46304 - DNA, 22 bp, synthetic construct
  misc_feature 1..22: note = chemically synthesized
  source 1..22: mol_type = other DNA
gcaaacttaaaacctgaatctt

SEQ ID NO: 46305 - DNA, 22 bp, synthetic construct
  misc_feature 1..22: note = chemically synthesized
  source 1..22: mol_type = other DNA
caaacttaaaacctgaatcttt

SEQ ID NO: 46306 - DNA, 22 bp, synthetic construct
  misc_feature 1..22: note = chemically synthesized
  source 1..22: mol_type = other DNA
aaaacctgaatctttgtagtat

SEQ ID NO: 46307 - DNA, 22 bp, synthetic construct
  misc_feature 1..22: note = chemically synthesized
  source 1..22: mol_type = other DNA
aaacctgaatctttgtagtata

SEQ ID NO: 46308 - DNA, 22 bp, synthetic construct
  misc_feature 1..22: note = chemically synthesized
  source 1..22: mol_type = other DNA
aatctttgtagtataaatccct

SEQ ID NO: 46309 - DNA, 22 bp, synthetic construct
  misc_feature 1..22: note = chemically synthesized
  source 1..22: mol_type = other DNA
tgtagtataaatcccttgaaat

SEQ ID NO: 46310 - DNA, 22 bp, synthetic construct
  misc_feature 1..22: note = chemically synthesized
  source 1..22: mol_type = other DNA
gtagtataaatcccttgaaatg

SEQ ID NO: 46311 - DNA, 22 bp, synthetic construct
  misc_feature 1..22: note = chemically synthesized
  source 1..22: mol_type = other DNA
tagtataaatcccttgaaatgc

SEQ ID NO: 46312 - DNA, 22 bp, synthetic construct
  misc_feature 1..22: note = chemically synthesized
  source 1..22: mol_type = other DNA
gaaatgcatgtaggctggacat

SEQ ID NO: 46313 - DNA, 22 bp, synthetic construct
  misc_feature 1..22: note = chemically synthesized
  source 1..22: mol_type = other DNA
aaatgcatgtaggctggacatc

SEQ ID NO: 46314 - DNA, 22 bp, synthetic construct
  misc_feature 1..22: note = chemically synthesized
  source 1..22: mol_type = other DNA
gacatcaaaagcaagcaatctc

SEQ ID NO: 46315 - DNA, 22 bp, synthetic construct
  misc_feature 1..22: note = chemically synthesized
  source 1..22: mol_type = other DNA
ttcaaggagcagctagttggta

SEQ ID NO: 46316 - DNA, 22 bp, synthetic construct
  misc_feature 1..22: note = chemically synthesized
  source 1..22: mol_type = other DNA
caaggagcagctagttggtaag

SEQ ID NO: 46317 - DNA, 22 bp, synthetic construct
  misc_feature 1..22: note = chemically synthesized
  source 1..22: mol_type = other DNA
aaggagcagctagttggtaagg

SEQ ID NO: 46318 - DNA, 22 bp, synthetic construct
  misc_feature 1..22: note = chemically synthesized
  source 1..22: mol_type = other DNA
gttggtaaggtcagtgtgcagg

SEQ ID NO: 46319 - DNA, 22 bp, synthetic construct
  misc_feature 1..22: note = chemically synthesized
  source 1..22: mol_type = other DNA
gtaaggtcagtgtgcagggtgc

SEQ ID NO: 46320 - DNA, 22 bp, synthetic construct
  misc_feature 1..22: note = chemically synthesized
  source 1..22: mol_type = other DNA
agtttagaaggctgccaggtta

SEQ ID NO: 46321 - DNA, 22 bp, synthetic construct
  misc_feature 1..22: note = chemically synthesized
  source 1..22: mol_type = other DNA
agaaggctgccaggttaaggcc

SEQ ID NO: 46322 - DNA, 22 bp, synthetic construct
  misc_feature 1..22: note = chemically synthesized
  source 1..22: mol_type = other DNA
gaaggctgccaggttaaggcca

SEQ ID NO: 46323 - DNA, 22 bp, synthetic construct
  misc_feature 1..22: note = chemically synthesized
  source 1..22: mol_type = other DNA
ccaggttaaggccagtggaaag

SEQ ID NO: 46324 - DNA, 22 bp, synthetic construct
  misc_feature 1..22: note = chemically synthesized
  source 1..22: mol_type = other DNA
aggccagtggaaagaattcggt

SEQ ID NO: 46325 - DNA, 22 bp, synthetic construct
  misc_feature 1..22: note = chemically synthesized
  source 1..22: mol_type = other DNA
ggtgggcagcgaggagtccaca

SEQ ID NO: 46326 - DNA, 22 bp, synthetic construct
  misc_feature 1..22: note = chemically synthesized
  source 1..22: mol_type = other DNA
attcagaagtctcactggtcag

SEQ ID NO: 46327 - DNA, 22 bp, synthetic construct
  misc_feature 1..22: note = chemically synthesized
  source 1..22: mol_type = other DNA
agaagtctcactggtcagcagg

SEQ ID NO: 46328 - DNA, 22 bp, synthetic construct
  misc_feature 1..22: note = chemically synthesized
  source 1..22: mol_type = other DNA
actggtcagcaggagacaaggt

SEQ ID NO: 46329 - DNA, 22 bp, synthetic construct
  misc_feature 1..22: note = chemically synthesized
  source 1..22: mol_type = other DNA
gtcagcaggagacaaggtggac

SEQ ID NO: 46330 - DNA, 22 bp, synthetic construct
  misc_feature 1..22: note = chemically synthesized
  source 1..22: mol_type = other DNA
aaaaggtgggcccggcagaact

SEQ ID NO: 46331 - DNA, 22 bp, synthetic construct
  misc_feature 1..22: note = chemically synthesized
  source 1..22: mol_type = other DNA
ggagtctggcatcccacgcagg

SEQ ID NO: 46332 - DNA, 22 bp, synthetic construct
  misc_feature 1..22: note = chemically synthesized
  source 1..22: mol_type = other DNA
gagtctggcatcccacgcaggg

SEQ ID NO: 46333 - DNA, 22 bp, synthetic construct
  misc_feature 1..22: note = chemically synthesized
  source 1..22: mol_type = other DNA
gcatcccacgcagggtgagagg

SEQ ID NO: 46334 - DNA, 22 bp, synthetic construct
  misc_feature 1..22: note = chemically synthesized
  source 1..22: mol_type = other DNA
gggcgccggcctgccttccagc

SEQ ID NO: 46335 - DNA, 22 bp, synthetic construct
  misc_feature 1..22: note = chemically synthesized
  source 1..22: mol_type = other DNA
ccttccagcccagttaggattt

SEQ ID NO: 46336 - DNA, 22 bp, synthetic construct
  misc_feature 1..22: note = chemically synthesized
  source 1..22: mol_type = other DNA
ccagcccagttaggatttggga

SEQ ID NO: 46337 - DNA, 22 bp, synthetic construct
  misc_feature 1..22: note = chemically synthesized
  source 1..22: mol_type = other DNA
cagcccagttaggatttgggag

SEQ ID NO: 46338 - DNA, 22 bp, synthetic construct
  misc_feature 1..22: note = chemically synthesized
  source 1..22: mol_type = other DNA
ggatttgggagttttttcttcc

SEQ ID NO: 46339 - DNA, 22 bp, synthetic construct
  misc_feature 1..22: note = chemically synthesized
  source 1..22: mol_type = other DNA
gggagttttttcttccctctgc

SEQ ID NO: 46340 - DNA, 22 bp, synthetic construct
  misc_feature 1..22: note = chemically synthesized
  source 1..22: mol_type = other DNA
ggagttttttcttccctctgcg

SEQ ID NO: 46341 - DNA, 22 bp, synthetic construct
  misc_feature 1..22: note = chemically synthesized
  source 1..22: mol_type = other DNA
tttcttccctctgcgcgtaatc

SEQ ID NO: 46342 - DNA, 22 bp, synthetic construct
  misc_feature 1..22: note = chemically synthesized
  source 1..22: mol_type = other DNA
ttcttccctctgcgcgtaatct

SEQ ID NO: 46343 - DNA, 22 bp, synthetic construct
  misc_feature 1..22: note = chemically synthesized
  source 1..22: mol_type = other DNA
tcttccctctgcgcgtaatctg

SEQ ID NO: 46344 - DNA, 22 bp, synthetic construct
  misc_feature 1..22: note = chemically synthesized
  source 1..22: mol_type = other DNA
cttccctctgcgcgtaatctga

SEQ ID NO: 46345 - DNA, 22 bp, synthetic construct
  misc_feature 1..22: note = chemically synthesized
  source 1..22: mol_type = other DNA
ttccctctgcgcgtaatctgac

SEQ ID NO: 46346 - DNA, 22 bp, synthetic construct
  misc_feature 1..22: note = chemically synthesized
  source 1..22: mol_type = other DNA
ccctctgcgcgtaatctgacgc

SEQ ID NO: 46347 - DNA, 22 bp, synthetic construct
  misc_feature 1..22: note = chemically synthesized
  source 1..22: mol_type = other DNA
cctctgcgcgtaatctgacgct

SEQ ID NO: 46348 - DNA, 22 bp, synthetic construct
  misc_feature 1..22: note = chemically synthesized
  source 1..22: mol_type = other DNA
tgcgcgtaatctgacgctgttt

SEQ ID NO: 46349 - DNA, 22 bp, synthetic construct
  misc_feature 1..22: note = chemically synthesized
  source 1..22: mol_type = other DNA
cgcgtaatctgacgctgtttgg

SEQ ID NO: 46350 - DNA, 22 bp, synthetic construct
  misc_feature 1..22: note = chemically synthesized
  source 1..22: mol_type = other DNA
acgctgtttggggagggcgagg

SEQ ID NO: 46351 - DNA, 22 bp, synthetic construct
  misc_feature 1..22: note = chemically synthesized
  source 1..22: mol_type = other DNA
tttggggagggcgaggccgaaa

SEQ ID NO: 46352 - DNA, 22 bp, synthetic construct
  misc_feature 1..22: note = chemically synthesized
  source 1..22: mol_type = other DNA
ggggagggcgaggccgaaacct

SEQ ID NO: 46353 - DNA, 22 bp, synthetic construct
  misc_feature 1..22: note = chemically synthesized
  source 1..22: mol_type = other DNA
gggagggcgaggccgaaacctg

SEQ ID NO: 46354 - DNA, 22 bp, synthetic construct
  misc_feature 1..22: note = chemically synthesized
  source 1..22: mol_type = other DNA
atcctccagtccgggggttccg

SEQ ID NO: 46355 - DNA, 22 bp, synthetic construct
  misc_feature 1..22: note = chemically synthesized
  source 1..22: mol_type = other DNA
cagtccgggggttccgttaatg

SEQ ID NO: 46356 - DNA, 22 bp, synthetic construct
  misc_feature 1..22: note = chemically synthesized
  source 1..22: mol_type = other DNA
cgttaatgtttaatcagatagg

SEQ ID NO: 46357 - DNA, 22 bp, synthetic construct
  misc_feature 1..22: note = chemically synthesized
  source 1..22: mol_type = other DNA
atgtttaatcagataggatcgt

SEQ ID NO: 46358 - DNA, 22 bp, synthetic construct
  misc_feature 1..22: note = chemically synthesized
  source 1..22: mol_type = other DNA
aatcagataggatcgtccgatg

SEQ ID NO: 46359 - DNA, 22 bp, synthetic construct
  misc_feature 1..22: note = chemically synthesized
  source 1..22: mol_type = other DNA
atcagataggatcgtccgatgg

SEQ ID NO: 46360 - DNA, 22 bp, synthetic construct
  misc_feature 1..22: note = chemically synthesized
  source 1..22: mol_type = other DNA
tggtggcgtgatctgcgcgccc

SEQ ID NO: 46361 - DNA, 22 bp, synthetic construct
  misc_feature 1..22: note = chemically synthesized
  source 1..22: mol_type = other DNA
gtggcgtgatctgcgcgcccca

SEQ ID NO: 46362 - DNA, 22 bp, synthetic construct
  misc_feature 1..22: note = chemically synthesized
  source 1..22: mol_type = other DNA
cgcgccccaggcgtcaagcacc

SEQ ID NO: 46363 - DNA, 22 bp, synthetic construct
  misc_feature 1..22: note = chemically synthesized
  source 1..22: mol_type = other DNA
gaaggtttccgcagcgacgtcg

SEQ ID NO: 46364 - DNA, 22 bp, synthetic construct
  misc_feature 1..22: note = chemically synthesized
  source 1..22: mol_type = other DNA
ccgcagcgacgtcgaggcgctc

SEQ ID NO: 46365 - DNA, 22 bp, synthetic construct
  misc_feature 1..22: note = chemically synthesized
  source 1..22: mol_type = other DNA
cgcagcgacgtcgaggcgctca

SEQ ID NO: 46366 - DNA, 22 bp, synthetic construct
  misc_feature 1..22: note = chemically synthesized
  source 1..22: mol_type = other DNA
atggttgcaggcgggcgccgcc

SEQ ID NO: 46367 - DNA, 22 bp, synthetic construct
  misc_feature 1..22: note = chemically synthesized
  source 1..22: mol_type = other DNA
caggcgggcgccgccgttcagt

SEQ ID NO: 46368 - DNA, 22 bp, synthetic construct
  misc_feature 1..22: note = chemically synthesized
  source 1..22: mol_type = other DNA
agttcagggtctgagcctggag

SEQ ID NO: 46369 - DNA, 22 bp, synthetic construct
  misc_feature 1..22: note = chemically synthesized
  source 1..22: mol_type = other DNA
agggtctgagcctggaggagtg

SEQ ID NO: 46370 - DNA, 22 bp, synthetic construct
  misc_feature 1..22: note = chemically synthesized
  source 1..22: mol_type = other DNA
agcctggaggagtgagccaggc

SEQ ID NO: 46371 - DNA, 22 bp, synthetic construct
  misc_feature 1..22: note = chemically synthesized
  source 1..22: mol_type = other DNA
gaggagtgagccaggcagtgag

SEQ ID NO: 46372 - DNA, 22 bp, synthetic construct
  misc_feature 1..22: note = chemically synthesized
  source 1..22: mol_type = other DNA
gctcgggcgggccgggacgcgt

SEQ ID NO: 46373 - DNA, 22 bp, synthetic construct
  misc_feature 1..22: note = chemically synthesized
  source 1..22: mol_type = other DNA
gggcgggccgggacgcgtcgtt

SEQ ID NO: 46374 - DNA, 22 bp, synthetic construct
  misc_feature 1..22: note = chemically synthesized
  source 1..22: mol_type = other DNA
cagcagcggctcccagctccca

SEQ ID NO: 46375 - DNA, 22 bp, synthetic construct
  misc_feature 1..22: note = chemically synthesized
  source 1..22: mol_type = other DNA
ccagctcccagccaggattccg

SEQ ID NO: 46376 - DNA, 22 bp, synthetic construct
  misc_feature 1..22: note = chemically synthesized
  source 1..22: mol_type = other DNA
ccagccaggattccgcgcgccc

SEQ ID NO: 46377 - DNA, 22 bp, synthetic construct
  misc_feature 1..22: note = chemically synthesized
  source 1..22: mol_type = other DNA
cgcgcgccccttcacgcgccct

SEQ ID NO: 46378 - DNA, 22 bp, synthetic construct
  misc_feature 1..22: note = chemically synthesized
  source 1..22: mol_type = other DNA
cacgcgccctgctcctgaactt

SEQ ID NO: 46379 - DNA, 22 bp, synthetic construct
  misc_feature 1..22: note = chemically synthesized
  source 1..22: mol_type = other DNA
acgcgccctgctcctgaacttc

SEQ ID NO: 46380 - DNA, 22 bp, synthetic construct
  misc_feature 1..22: note = chemically synthesized
  source 1..22: mol_type = other DNA
ctcctgaacttcagctcctgca

SEQ ID NO: 46381 - DNA, 22 bp, synthetic construct
  misc_feature 1..22: note = chemically synthesized
  source 1..22: mol_type = other DNA
ctgaacttcagctcctgcacag

SEQ ID NO: 46382 - DNA, 22 bp, synthetic construct
  misc_feature 1..22: note = chemically synthesized
  source 1..22: mol_type = other DNA
aacttcagctcctgcacagtcc

SEQ ID NO: 46383 - DNA, 22 bp, synthetic construct
  misc_feature 1..22: note = chemically synthesized
  source 1..22: mol_type = other DNA
cagctcctgcacagtcctcccc

SEQ ID NO: 46384 - DNA, 22 bp, synthetic construct
  misc_feature 1..22: note = chemically synthesized
  source 1..22: mol_type = other DNA
agctcctgcacagtcctcccca

SEQ ID NO: 46385 - DNA, 22 bp, synthetic construct
  misc_feature 1..22: note = chemically synthesized
  source 1..22: mol_type = other DNA
ctgcacagtcctccccaccgca

SEQ ID NO: 46386 - DNA, 22 bp, synthetic construct
  misc_feature 1..22: note = chemically synthesized
  source 1..22: mol_type = other DNA
cacagtcctccccaccgcaagg

SEQ ID NO: 46387 - DNA, 22 bp, synthetic construct
  misc_feature 1..22: note = chemically synthesized
  source 1..22: mol_type = other DNA
cccaccgcaaggctcaaggcgc

SEQ ID NO: 46388 - DNA, 22 bp, synthetic construct
  misc_feature 1..22: note = chemically synthesized
  source 1..22: mol_type = other DNA
aaggcgccgccggcgtggaccg

SEQ ID NO: 46389 - DNA, 22 bp, synthetic construct
  misc_feature 1..22: note = chemically synthesized
  source 1..22: mol_type = other DNA
taggtctcctcgccaggacagc

SEQ ID NO: 46390 - DNA, 22 bp, synthetic construct
  misc_feature 1..22: note = chemically synthesized
  source 1..22: mol_type = other DNA
ggtctcctcgccaggacagcaa

SEQ ID NO: 46391 - DNA, 22 bp, synthetic construct
  misc_feature 1..22: note = chemically synthesized
  source 1..22: mol_type = other DNA
ctcgccaggacagcaacctctc

SEQ ID NO: 46392 - DNA, 22 bp, synthetic construct
  misc_feature 1..22: note = chemically synthesized
  source 1..22: mol_type = other DNA
gccaggacagcaacctctcccc

SEQ ID NO: 46393 - DNA, 22 bp, synthetic construct
  misc_feature 1..22: note = chemically synthesized
  source 1..22: mol_type = other DNA
tcccctggccctcatgggcacc

SEQ ID NO: 46394 - DNA, 22 bp, synthetic construct
  misc_feature 1..22: note = chemically synthesized
  source 1..22: mol_type = other DNA
ccctggccctcatgggcaccgt

SEQ ID NO: 46395 - DNA, 22 bp, synthetic construct
  misc_feature 1..22: note = chemically synthesized
  source 1..22: mol_type = other DNA
gccctcatgggcaccgtcagct

SEQ ID NO: 46396 - DNA, 22 bp, synthetic construct
  misc_feature 1..22: note = chemically synthesized
  source 1..22: mol_type = other DNA
atgggcaccgtcagctccaggc

SEQ ID NO: 46397 - DNA, 22 bp, synthetic construct
  misc_feature 1..22: note = chemically synthesized
  source 1..22: mol_type = other DNA
caggcggtcctggtggccgctg

SEQ ID NO: 46398 - DNA, 22 bp, synthetic construct
  misc_feature 1..22: note = chemically synthesized
  source 1..22: mol_type = other DNA
gtggccgctgccactgctgctg

SEQ ID NO: 46399 - DNA, 22 bp, synthetic construct
  misc_feature 1..22: note = chemically synthesized
  source 1..22: mol_type = other DNA
ccactgctgctgctgctgctgc

SEQ ID NO: 46400 - DNA, 22 bp, synthetic construct
  misc_feature 1..22: note = chemically synthesized
  source 1..22: mol_type = other DNA
ctgctgctgctgctgctgctcc

SEQ ID NO: 46401 - DNA, 22 bp, synthetic construct
  misc_feature 1..22: note = chemically synthesized
  source 1..22: mol_type = other DNA
ctgctgctgctgctgctcctgg

SEQ ID NO: 46402 - DNA, 22 bp, synthetic construct
  misc_feature 1..22: note = chemically synthesized
  source 1..22: mol_type = other DNA
ctgctgctgctgctcctgggtc

SEQ ID NO: 46403 - DNA, 22 bp, synthetic construct
  misc_feature 1..22: note = chemically synthesized
  source 1..22: mol_type = other DNA
ctgctgctgctcctgggtcccg

SEQ ID NO: 46404 - DNA, 22 bp, synthetic construct
  misc_feature 1..22: note = chemically synthesized
  source 1..22: mol_type = other DNA
ctgctgctcctgggtcccgcgg

SEQ ID NO: 46405 - DNA, 22 bp, synthetic construct
  misc_feature 1..22: note = chemically synthesized
  source 1..22: mol_type = other DNA
ctgctcctgggtcccgcgggcg

SEQ ID NO: 46406 - DNA, 22 bp, synthetic construct
  misc_feature 1..22: note = chemically synthesized
  source 1..22: mol_type = other DNA
ctcctgggtcccgcgggcgccc

SEQ ID NO: 46407 - DNA, 22 bp, synthetic construct
  misc_feature 1..22: note = chemically synthesized
  source 1..22: mol_type = other DNA
ctgggtcccgcgggcgcccgtg

SEQ ID NO: 46408 - DNA, 22 bp, synthetic construct
  misc_feature 1..22: note = chemically synthesized
  source 1..22: mol_type = other DNA
ggtcccgcgggcgcccgtgcgc

SEQ ID NO: 46409 - DNA, 22 bp, synthetic construct
  misc_feature 1..22: note = chemically synthesized
  source 1..22: mol_type = other DNA
cgaggagctggtgctagccttg

SEQ ID NO: 46410 - DNA, 22 bp, synthetic construct
  misc_feature 1..22: note = chemically synthesized
  source 1..22: mol_type = other DNA
gtgctagccttgcgttccgagg

SEQ ID NO: 46411 - DNA, 22 bp, synthetic construct
  misc_feature 1..22: note = chemically synthesized
  source 1..22: mol_type = other DNA
gccttgcgttccgaggaggacg

SEQ ID NO: 46412 - DNA, 22 bp, synthetic construct
  misc_feature 1..22: note = chemically synthesized
  source 1..22: mol_type = other DNA
gcgttccgaggaggacggcctg

SEQ ID NO: 46413 - DNA, 22 bp, synthetic construct
  misc_feature 1..22: note = chemically synthesized
  source 1..22: mol_type = other DNA
cgttccgaggaggacggcctgg

SEQ ID NO: 46414 - DNA, 22 bp, synthetic construct
  misc_feature 1..22: note = chemically synthesized
  source 1..22: mol_type = other DNA
cgaggaggacggcctggccgaa

SEQ ID NO: 46415 - DNA, 22 bp, synthetic construct
  misc_feature 1..22: note = chemically synthesized
  source 1..22: mol_type = other DNA
gccgaagcacccgagcacggaa

SEQ ID NO: 46416 - DNA, 22 bp, synthetic construct
  misc_feature 1..22: note = chemically synthesized
  source 1..22: mol_type = other DNA
ccaccgctgcgccaaggtgcgg

SEQ ID NO: 46417 - DNA, 22 bp, synthetic construct
  misc_feature 1..22: note = chemically synthesized
  source 1..22: mol_type = other DNA
caccgctgcgccaaggtgcggg

SEQ ID NO: 46418 - DNA, 22 bp, synthetic construct
  misc_feature 1..22: note = chemically synthesized
  source 1..22: mol_type = other DNA
cgccaaggtgcgggtgtaggga

SEQ ID NO: 46419 - DNA, 22 bp, synthetic construct
  misc_feature 1..22: note = chemically synthesized
  source 1..22: mol_type = other DNA
tttcctctcgggcctcagtttc

SEQ ID NO: 46420 - DNA, 22 bp, synthetic construct
  misc_feature 1..22: note = chemically synthesized
  source 1..22: mol_type = other DNA
cctctcgggcctcagtttcccc

SEQ ID NO: 46421 - DNA, 22 bp, synthetic construct
  misc_feature 1..22: note = chemically synthesized
  source 1..22: mol_type = other DNA
ctctcgggcctcagtttccccc

SEQ ID NO: 46422 - DNA, 22 bp, synthetic construct
  misc_feature 1..22: note = chemically synthesized
  source 1..22: mol_type = other DNA
tcgggcctcagtttccccccat

SEQ ID NO: 46423 - DNA, 22 bp, synthetic construct
  misc_feature 1..22: note = chemically synthesized
  source 1..22: mol_type = other DNA
gggcctcagtttccccccatgt

SEQ ID NO: 46424 - DNA, 22 bp, synthetic construct
  misc_feature 1..22: note = chemically synthesized
  source 1..22: mol_type = other DNA
agtttccccccatgtaagagag

SEQ ID NO: 46425 - DNA, 22 bp, synthetic construct
  misc_feature 1..22: note = chemically synthesized
  source 1..22: mol_type = other DNA
ccccccatgtaagagaggaagt

SEQ ID NO: 46426 - DNA, 22 bp, synthetic construct
  misc_feature 1..22: note = chemically synthesized
  source 1..22: mol_type = other DNA
cccccatgtaagagaggaagtg

SEQ ID NO: 46427 - DNA, 22 bp, synthetic construct
  misc_feature 1..22: note = chemically synthesized
  source 1..22: mol_type = other DNA
ttcgcttggcacgatcttgggg

SEQ ID NO: 46428 - DNA, 22 bp, synthetic construct
  misc_feature 1..22: note = chemically synthesized
  source 1..22: mol_type = other DNA
cgcttggcacgatcttggggac

SEQ ID NO: 46429 - DNA, 22 bp, synthetic construct
  misc_feature 1..22: note = chemically synthesized
  source 1..22: mol_type = other DNA
gcttggcacgatcttggggact

SEQ ID NO: 46430 - DNA, 22 bp, synthetic construct
  misc_feature 1..22: note = chemically synthesized
  source 1..22: mol_type = other DNA
ggcacgatcttggggactgcag

SEQ ID NO: 46431 - DNA, 22 bp, synthetic construct
  misc_feature 1..22: note = chemically synthesized
  source 1..22: mol_type = other DNA
gcacgatcttggggactgcagg

SEQ ID NO: 46432 - DNA, 22 bp, synthetic construct
  misc_feature 1..22: note = chemically synthesized
  source 1..22: mol_type = other DNA
ggggactgcaggcaaggcggcg

SEQ ID NO: 46433 - DNA, 22 bp, synthetic construct
  misc_feature 1..22: note = chemically synthesized
  source 1..22: mol_type = other DNA
gggactgcaggcaaggcggcgg

SEQ ID NO: 46434 - DNA, 22 bp, synthetic construct
  misc_feature 1..22: note = chemically synthesized
  source 1..22: mol_type = other DNA
caggcaaggcggcgggggagga

SEQ ID NO: 46435 - DNA, 22 bp, synthetic construct
  misc_feature 1..22: note = chemically synthesized
  source 1..22: mol_type = other DNA
tttggggacttgctggggcgtg

SEQ ID NO: 46436 - DNA, 22 bp, synthetic construct
  misc_feature 1..22: note = chemically synthesized
  source 1..22: mol_type = other DNA
tggggacttgctggggcgtgcg

SEQ ID NO: 46437 - DNA, 22 bp, synthetic construct
  misc_feature 1..22: note = chemically synthesized
  source 1..22: mol_type = other DNA
ggggacttgctggggcgtgcgg

SEQ ID NO: 46438 - DNA, 22 bp, synthetic construct
  misc_feature 1..22: note = chemically synthesized
  source 1..22: mol_type = other DNA
gggacttgctggggcgtgcggc

SEQ ID NO: 46439 - DNA, 22 bp, synthetic construct
  misc_feature 1..22: note = chemically synthesized
  source 1..22: mol_type = other DNA
gctggggcgtgcggctgcgcta

SEQ ID NO: 46440 - DNA, 22 bp, synthetic construct
  misc_feature 1..22: note = chemically synthesized
  source 1..22: mol_type = other DNA
ctggggcgtgcggctgcgctat

SEQ ID NO: 46441 - DNA, 22 bp, synthetic construct
  misc_feature 1..22: note = chemically synthesized
  source 1..22: mol_type = other DNA
gggcgtgcggctgcgctattca

SEQ ID NO: 46442 - DNA, 22 bp, synthetic construct
  misc_feature 1..22: note = chemically synthesized
  source 1..22: mol_type = other DNA
cgctattcagtgggaaggttcg

SEQ ID NO: 46443 - DNA, 22 bp, synthetic construct
  misc_feature 1..22: note = chemically synthesized
  source 1..22: mol_type = other DNA
ttcagtgggaaggttcgcgggg

SEQ ID NO: 46444 - DNA, 22 bp, synthetic construct
  misc_feature 1..22: note = chemically synthesized
  source 1..22: mol_type = other DNA
agtgggaaggttcgcggggttg

SEQ ID NO: 46445 - DNA, 22 bp, synthetic construct
  misc_feature 1..22: note = chemically synthesized
  source 1..22: mol_type = other DNA
gcggggttgggagacccggagg

SEQ ID NO: 46446 - DNA, 22 bp, synthetic construct
  misc_feature 1..22: note = chemically synthesized
  source 1..22: mol_type = other DNA
ggagacccggaggccgaggaag

SEQ ID NO: 46447 - DNA, 22 bp, synthetic construct
  misc_feature 1..22: note = chemically synthesized
  source 1..22: mol_type = other DNA
ccaggatatcctgcccagattt

SEQ ID NO: 46448 - DNA, 22 bp, synthetic construct
  misc_feature 1..22: note = chemically synthesized
  source 1..22: mol_type = other DNA
cccagatttcccagtttctgcc

SEQ ID NO: 46449 - DNA, 22 bp, synthetic construct
  misc_feature 1..22: note = chemically synthesized
  source 1..22: mol_type = other DNA
cccagtttctgcctcgccgcgg

SEQ ID NO: 46450 - DNA, 22 bp, synthetic construct
  misc_feature 1..22: note = chemically synthesized
  source 1..22: mol_type = other DNA
ccagtttctgcctcgccgcggc

SEQ ID NO: 46451 - DNA, 22 bp, synthetic construct
  misc_feature 1..22: note = chemically synthesized
  source 1..22: mol_type = other DNA
ctgcctcgccgcggcacaggtg

SEQ ID NO: 46452 - DNA, 22 bp, synthetic construct
  misc_feature 1..22: note = chemically synthesized
  source 1..22: mol_type = other DNA
tgcctcgccgcggcacaggtgg

SEQ ID NO: 46453 - DNA, 22 bp, synthetic construct
  misc_feature 1..22: note = chemically synthesized
  source 1..22: mol_type = other DNA
cctcgccgcggcacaggtgggt

SEQ ID NO: 46454 - DNA, 22 bp, synthetic construct
  misc_feature 1..22: note = chemically synthesized
  source 1..22: mol_type = other DNA
gccgcggcacaggtgggtgaag

SEQ ID NO: 46455 - DNA, 22 bp, synthetic construct
  misc_feature 1..22: note = chemically synthesized
  source 1..22: mol_type = other DNA
gaacgtactgggaactgcacca

SEQ ID NO: 46456 - DNA, 22 bp, synthetic construct
  misc_feature 1..22: note = chemically synthesized
  source 1..22: mol_type = other DNA
ggaactgcaccaggcacagaga

SEQ ID NO: 46457 - DNA, 22 bp, synthetic construct
  misc_feature 1..22: note = chemically synthesized
  source 1..22: mol_type = other DNA
caccaggcacagagaaagcggg

SEQ ID NO: 46458 - DNA, 22 bp, synthetic construct
  misc_feature 1..22: note = chemically synthesized
  source 1..22: mol_type = other DNA
gccattatagtgggttccgatt

SEQ ID NO: 46459 - DNA, 22 bp, synthetic construct
  misc_feature 1..22: note = chemically synthesized
  source 1..22: mol_type = other DNA
ccattatagtgggttccgattt

SEQ ID NO: 46460 - DNA, 22 bp, synthetic construct
  misc_feature 1..22: note = chemically synthesized
  source 1..22: mol_type = other DNA
tagtgggttccgatttggtttg

SEQ ID NO: 46461 - DNA, 22 bp, synthetic construct
  misc_feature 1..22: note = chemically synthesized
  source 1..22: mol_type = other DNA
cgatttggtttggaaaacatgg

SEQ ID NO: 46462 - DNA, 22 bp, synthetic construct
  misc_feature 1..22: note = chemically synthesized
  source 1..22: mol_type = other DNA
ggtttggaaaacatgggcagcg

SEQ ID NO: 46463 - DNA, 22 bp, synthetic construct
  misc_feature 1..22: note = chemically synthesized
  source 1..22: mol_type = other DNA
gtttggaaaacatgggcagcgg

SEQ ID NO: 46464 - DNA, 22 bp, synthetic construct
  misc_feature 1..22: note = chemically synthesized
  source 1..22: mol_type = other DNA
ggaaaacatgggcagcggaggg

SEQ ID NO: 46465 - DNA, 22 bp, synthetic construct
  misc_feature 1..22: note = chemically synthesized
  source 1..22: mol_type = other DNA
gaaaacatgggcagcggagggt

SEQ ID NO: 46466 - DNA, 22 bp, synthetic construct
  misc_feature 1..22: note = chemically synthesized
  source 1..22: mol_type = other DNA
gagagaaggccctacccgagac

SEQ ID NO: 46467 - DNA, 22 bp, synthetic construct
  misc_feature 1..22: note = chemically synthesized
  source 1..22: mol_type = other DNA
cccgagacaggggcggggtggg

SEQ ID NO: 46468 - DNA, 22 bp, synthetic construct
  misc_feature 1..22: note = chemically synthesized
  source 1..22: mol_type = other DNA
ggagcacgaggcaatttcttta

SEQ ID NO: 46469 - DNA, 22 bp, synthetic construct
  misc_feature 1..22: note = chemically synthesized
  source 1..22: mol_type = other DNA
ctttatgacacagaactcatgc

SEQ ID NO: 46470 - DNA, 22 bp, synthetic construct
  misc_feature 1..22: note = chemically synthesized
  source 1..22: mol_type = other DNA
tttatgacacagaactcatgct

SEQ ID NO: 46471 - DNA, 22 bp, synthetic construct
  misc_feature 1..22: note = chemically synthesized
  source 1..22: mol_type = other DNA
tatgacacagaactcatgctct

SEQ ID NO: 46472 - DNA, 22 bp, synthetic construct
  misc_feature 1..22: note = chemically synthesized
  source 1..22: mol_type = other DNA
atgacacagaactcatgctcta

SEQ ID NO: 46473 - DNA, 22 bp, synthetic construct
  misc_feature 1..22: note = chemically synthesized
  source 1..22: mol_type = other DNA
tgacacagaactcatgctctag

SEQ ID NO: 46474 - DNA, 22 bp, synthetic construct
  misc_feature 1..22: note = chemically synthesized
  source 1..22: mol_type = other DNA
atgctctagtattccatctgtt

SEQ ID NO: 46475 - DNA, 22 bp, synthetic construct
  misc_feature 1..22: note = chemically synthesized
  source 1..22: mol_type = other DNA
tagtattccatctgtttcagcc

SEQ ID NO: 46476 - DNA, 22 bp, synthetic construct
  misc_feature 1..22: note = chemically synthesized
  source 1..22: mol_type = other DNA
gtattccatctgtttcagccga

SEQ ID NO: 46477 - DNA, 22 bp, synthetic construct
  misc_feature 1..22: note = chemically synthesized
  source 1..22: mol_type = other DNA
catctgtttcagccgaagaaaa

SEQ ID NO: 46478 - DNA, 22 bp, synthetic construct
  misc_feature 1..22: note = chemically synthesized
  source 1..22: mol_type = other DNA
tttcagccgaagaaaagaacca

SEQ ID NO: 46479 - DNA, 22 bp, synthetic construct
  misc_feature 1..22: note = chemically synthesized
  source 1..22: mol_type = other DNA
cagccgaagaaaagaaccagct

SEQ ID NO: 46480 - DNA, 22 bp, synthetic construct
  misc_feature 1..22: note = chemically synthesized
  source 1..22: mol_type = other DNA
agccgaagaaaagaaccagctg

SEQ ID NO: 46481 - DNA, 22 bp, synthetic construct
  misc_feature 1..22: note = chemically synthesized
  source 1..22: mol_type = other DNA
aaggggcaggggagaaggggcg

SEQ ID NO: 46482 - DNA, 22 bp, synthetic construct
  misc_feature 1..22: note = chemically synthesized
  source 1..22: mol_type = other DNA
tcgaggcccattggcgtccttt

SEQ ID NO: 46483 - DNA, 22 bp, synthetic construct
  misc_feature 1..22: note = chemically synthesized
  source 1..22: mol_type = other DNA
gaggcccattggcgtcctttag

SEQ ID NO: 46484 - DNA, 22 bp, synthetic construct
  misc_feature 1..22: note = chemically synthesized
  source 1..22: mol_type = other DNA
gcgtcctttaggactcaggcag

SEQ ID NO: 46485 - DNA, 22 bp, synthetic construct
  misc_feature 1..22: note = chemically synthesized
  source 1..22: mol_type = other DNA
taggactcaggcagggaagggc

SEQ ID NO: 46486 - DNA, 22 bp, synthetic construct
  misc_feature 1..22: note = chemically synthesized
  source 1..22: mol_type = other DNA
aggactcaggcagggaagggcc

SEQ ID NO: 46487 - DNA, 22 bp, synthetic construct
  misc_feature 1..22: note = chemically synthesized
  source 1..22: mol_type = other DNA
ggactcaggcagggaagggccc

SEQ ID NO: 46488 - DNA, 22 bp, synthetic construct
  misc_feature 1..22: note = chemically synthesized
  source 1..22: mol_type = other DNA
aggcagggaagggcccttggtg

SEQ ID NO: 46489 - DNA, 22 bp, synthetic construct
  misc_feature 1..22: note = chemically synthesized
  source 1..22: mol_type = other DNA
ggtgctctggagccggaggtgg

SEQ ID NO: 46490 - DNA, 22 bp, synthetic construct
  misc_feature 1..22: note = chemically synthesized
  source 1..22: mol_type = other DNA
gtgctctggagccggaggtggt

SEQ ID NO: 46491 - DNA, 22 bp, synthetic construct
  misc_feature 1..22: note = chemically synthesized
  source 1..22: mol_type = other DNA
tggagccggaggtggtgcgcct

SEQ ID NO: 46492 - DNA, 22 bp, synthetic construct
  misc_feature 1..22: note = chemically synthesized
  source 1..22: mol_type = other DNA
gagccggaggtggtgcgcctgg

SEQ ID NO: 46493 - DNA, 22 bp, synthetic construct
  misc_feature 1..22: note = chemically synthesized
  source 1..22: mol_type = other DNA
gtactgggaccccggagctgag

SEQ ID NO: 46494 - DNA, 22 bp, synthetic construct
  misc_feature 1..22: note = chemically synthesized
  source 1..22: mol_type = other DNA
ggaccccggagctgagcccggc

SEQ ID NO: 46495 - DNA, 22 bp, synthetic construct
  misc_feature 1..22: note = chemically synthesized
  source 1..22: mol_type = other DNA
agcccggcgcctcagcccacct

SEQ ID NO: 46496 - DNA, 22 bp, synthetic construct
  misc_feature 1..22: note = chemically synthesized
  source 1..22: mol_type = other DNA
agcccacctggctgtctgccga

SEQ ID NO: 46497 - DNA, 22 bp, synthetic construct
  misc_feature 1..22: note = chemically synthesized
  source 1..22: mol_type = other DNA
gctgtctgccgaccgtgtgcgg

SEQ ID NO: 46498 - DNA, 22 bp, synthetic construct
  misc_feature 1..22: note = chemically synthesized
  source 1..22: mol_type = other DNA
tctgccgaccgtgtgcggggcg

SEQ ID NO: 46499 - DNA, 22 bp, synthetic construct
  misc_feature 1..22: note = chemically synthesized
  source 1..22: mol_type = other DNA
ccgaccgtgtgcggggcgagtt

SEQ ID NO: 46500 - DNA, 22 bp, synthetic construct
  misc_feature 1..22: note = chemically synthesized
  source 1..22: mol_type = other DNA
gctcaacaactctgccagcttc

SEQ ID NO: 46501 - DNA, 22 bp, synthetic construct
  misc_feature 1..22: note = chemically synthesized
  source 1..22: mol_type = other DNA
ctcaacaactctgccagcttct

SEQ ID NO: 46502 - DNA, 22 bp, synthetic construct
  misc_feature 1..22: note = chemically synthesized
  source 1..22: mol_type = other DNA
aacaactctgccagcttctggc

SEQ ID NO: 46503 - DNA, 22 bp, synthetic construct
  misc_feature 1..22: note = chemically synthesized
  source 1..22: mol_type = other DNA
tgccagcttctggccctcaggc

SEQ ID NO: 46504 - DNA, 22 bp, synthetic construct
  misc_feature 1..22: note = chemically synthesized
  source 1..22: mol_type = other DNA
ccagcttctggccctcaggctg

SEQ ID NO: 46505 - DNA, 22 bp, synthetic construct
  misc_feature 1..22: note = chemically synthesized
  source 1..22: mol_type = other DNA
ctggccctcaggctgtgggaag

SEQ ID NO: 46506 - DNA, 22 bp, synthetic construct
  misc_feature 1..22: note = chemically synthesized
  source 1..22: mol_type = other DNA
tggccctcaggctgtgggaagc

SEQ ID NO: 46507 - DNA, 22 bp, synthetic construct
  misc_feature 1..22: note = chemically synthesized
  source 1..22: mol_type = other DNA
gccctcaggctgtgggaagctt

SEQ ID NO: 46508 - DNA, 22 bp, synthetic construct
  misc_feature 1..22: note = chemically synthesized
  source 1..22: mol_type = other DNA
aggctgtgggaagcttcttccc

SEQ ID NO: 46509 - DNA, 22 bp, synthetic construct
  misc_feature 1..22: note = chemically synthesized
  source 1..22: mol_type = other DNA
tgggaagcttcttcccggggcg

SEQ ID NO: 46510 - DNA, 22 bp, synthetic construct
  misc_feature 1..22: note = chemically synthesized
  source 1..22: mol_type = other DNA
cttcccggggcgagaccactag

SEQ ID NO: 46511 - DNA, 22 bp, synthetic construct
  misc_feature 1..22: note = chemically synthesized
  source 1..22: mol_type = other DNA
ttcccggggcgagaccactagc

SEQ ID NO: 46512 - DNA, 22 bp, synthetic construct
  misc_feature 1..22: note = chemically synthesized
  source 1..22: mol_type = other DNA
cccggggcgagaccactagctt

SEQ ID NO: 46513 - DNA, 22 bp, synthetic construct
  misc_feature 1..22: note = chemically synthesized
  source 1..22: mol_type = other DNA
ccggggcgagaccactagcttt

SEQ ID NO: 46514 - DNA, 22 bp, synthetic construct
  misc_feature 1..22: note = chemically synthesized
  source 1..22: mol_type = other DNA
gctttttctaagtattaccagc

SEQ ID NO: 46515 - DNA, 22 bp, synthetic construct
  misc_feature 1..22: note = chemically synthesized
  source 1..22: mol_type = other DNA
tttctaagtattaccagcccag

SEQ ID NO: 46516 - DNA, 22 bp, synthetic construct
  misc_feature 1..22: note = chemically synthesized
  source 1..22: mol_type = other DNA
ttctaagtattaccagcccagg

SEQ ID NO: 46517 - DNA, 22 bp, synthetic construct
  misc_feature 1..22: note = chemically synthesized
  source 1..22: mol_type = other DNA
tctaagtattaccagcccagga

SEQ ID NO: 46518 - DNA, 22 bp, synthetic construct
  misc_feature 1..22: note = chemically synthesized
  source 1..22: mol_type = other DNA
ctaagtattaccagcccaggac

SEQ ID NO: 46519 - DNA, 22 bp, synthetic construct
  misc_feature 1..22: note = chemically synthesized
  source 1..22: mol_type = other DNA
taagtattaccagcccaggact

SEQ ID NO: 46520 - DNA, 22 bp, synthetic construct
  misc_feature 1..22: note = chemically synthesized
  source 1..22: mol_type = other DNA
agtattaccagcccaggacttg

SEQ ID NO: 46521 - DNA, 22 bp, synthetic construct
  misc_feature 1..22: note = chemically synthesized
  source 1..22: mol_type = other DNA
ccagcccaggacttggctgagg

SEQ ID NO: 46522 - DNA, 22 bp, synthetic construct
  misc_feature 1..22: note = chemically synthesized
  source 1..22: mol_type = other DNA
ggctgaggttctgtgtccccca

SEQ ID NO: 46523 - DNA, 22 bp, synthetic construct
  misc_feature 1..22: note = chemically synthesized
  source 1..22: mol_type = other DNA
gctgaggttctgtgtcccccag

SEQ ID NO: 46524 - DNA, 22 bp, synthetic construct
  misc_feature 1..22: note = chemically synthesized
  source 1..22: mol_type = other DNA
aggttctgtgtcccccagcttg

SEQ ID NO: 46525 - DNA, 22 bp, synthetic construct
  misc_feature 1..22: note = chemically synthesized
  source 1..22: mol_type = other DNA
tgtgtcccccagcttggagtca

SEQ ID NO: 46526 - DNA, 22 bp, synthetic construct
  misc_feature 1..22: note = chemically synthesized
  source 1..22: mol_type = other DNA
tgtcccccagcttggagtcaga

SEQ ID NO: 46527 - DNA, 22 bp, synthetic construct
  misc_feature 1..22: note = chemically synthesized
  source 1..22: mol_type = other DNA
ggagtcagatgtggggttgaat

SEQ ID NO: 46528 - DNA, 22 bp, synthetic construct
  misc_feature 1..22: note = chemically synthesized
  source 1..22: mol_type = other DNA
gagtcagatgtggggttgaatc

SEQ ID NO: 46529 - DNA, 22 bp, synthetic construct
  misc_feature 1..22: note = chemically synthesized
  source 1..22: mol_type = other DNA
aatcttggcttcctctcactag

SEQ ID NO: 46530 - DNA, 22 bp, synthetic construct
  misc_feature 1..22: note = chemically synthesized
  source 1..22: mol_type = other DNA
ggcttcctctcactagctgtgg

SEQ ID NO: 46531 - DNA, 22 bp, synthetic construct
  misc_feature 1..22: note = chemically synthesized
  source 1..22: mol_type = other DNA
gcttcctctcactagctgtggt

SEQ ID NO: 46532 - DNA, 22 bp, synthetic construct
  misc_feature 1..22: note = chemically synthesized
  source 1..22: mol_type = other DNA
cctctcactagctgtggtgctt

SEQ ID NO: 46533 - DNA, 22 bp, synthetic construct
  misc_feature 1..22: note = chemically synthesized
  source 1..22: mol_type = other DNA
ctctcactagctgtggtgcttg

SEQ ID NO: 46534 - DNA, 22 bp, synthetic construct
  misc_feature 1..22: note = chemically synthesized
  source 1..22: mol_type = other DNA
tcactagctgtggtgcttgaca

SEQ ID NO: 46535 - DNA, 22 bp, synthetic construct
  misc_feature 1..22: note = chemically synthesized
  source 1..22: mol_type = other DNA
actagctgtggtgcttgacaag

SEQ ID NO: 46536 - DNA, 22 bp, synthetic construct
  misc_feature 1..22: note = chemically synthesized
  source 1..22: mol_type = other DNA
gctgtggtgcttgacaagtcac

SEQ ID NO: 46537 - DNA, 22 bp, synthetic construct
  misc_feature 1..22: note = chemically synthesized
  source 1..22: mol_type = other DNA
tggtgcttgacaagtcacttat

SEQ ID NO: 46538 - DNA, 22 bp, synthetic construct
  misc_feature 1..22: note = chemically synthesized
  source 1..22: mol_type = other DNA
gacaagtcacttatccttgagc

SEQ ID NO: 46539 - DNA, 22 bp, synthetic construct
  misc_feature 1..22: note = chemically synthesized
  source 1..22: mol_type = other DNA
acaagtcacttatccttgagcc

SEQ ID NO: 46540 - DNA, 22 bp, synthetic construct
  misc_feature 1..22: note = chemically synthesized
  source 1..22: mol_type = other DNA
atccttgagcctccattgccta

SEQ ID NO: 46541 - DNA, 22 bp, synthetic construct
  misc_feature 1..22: note = chemically synthesized
  source 1..22: mol_type = other DNA
tccttgagcctccattgcctaa

SEQ ID NO: 46542 - DNA, 22 bp, synthetic construct
  misc_feature 1..22: note = chemically synthesized
  source 1..22: mol_type = other DNA
gagcctccattgcctaatcttt

SEQ ID NO: 46543 - DNA, 22 bp, synthetic construct
  misc_feature 1..22: note = chemically synthesized
  source 1..22: mol_type = other DNA
agcctccattgcctaatcttta

SEQ ID NO: 46544 - DNA, 22 bp, synthetic construct
  misc_feature 1..22: note = chemically synthesized
  source 1..22: mol_type = other DNA
cattgcctaatctttaaaaggg

SEQ ID NO: 46545 - DNA, 22 bp, synthetic construct
  misc_feature 1..22: note = chemically synthesized
  source 1..22: mol_type = other DNA
cctaatctttaaaagggaggtg

SEQ ID NO: 46546 - DNA, 22 bp, synthetic construct
  misc_feature 1..22: note = chemically synthesized
  source 1..22: mol_type = other DNA
atctttaaaagggaggtgacaa

SEQ ID NO: 46547 - DNA, 22 bp, synthetic construct
  misc_feature 1..22: note = chemically synthesized
  source 1..22: mol_type = other DNA
taaaagggaggtgacaatcgtc

SEQ ID NO: 46548 - DNA, 22 bp, synthetic construct
  misc_feature 1..22: note = chemically synthesized
  source 1..22: mol_type = other DNA
aaaagggaggtgacaatcgtcc

SEQ ID NO: 46549 - DNA, 22 bp, synthetic construct
  misc_feature 1..22: note = chemically synthesized
  source 1..22: mol_type = other DNA
aaagggaggtgacaatcgtccc

SEQ ID NO: 46550 - DNA, 22 bp, synthetic construct
  misc_feature 1..22: note = chemically synthesized
  source 1..22: mol_type = other DNA
cggctcagtggcagcagatggg

SEQ ID NO: 46551 - DNA, 22 bp, synthetic construct
  misc_feature 1..22: note = chemically synthesized
  source 1..22: mol_type = other DNA
agtggcagcagatggggagatg

SEQ ID NO: 46552 - DNA, 22 bp, synthetic construct
  misc_feature 1..22: note = chemically synthesized
  source 1..22: mol_type = other DNA
tgttgaccatgagtgaacttac

SEQ ID NO: 46553 - DNA, 22 bp, synthetic construct
  misc_feature 1..22: note = chemically synthesized
  source 1..22: mol_type = other DNA
ttgaccatgagtgaacttacaa

SEQ ID NO: 46554 - DNA, 22 bp, synthetic construct
  misc_feature 1..22: note = chemically synthesized
  source 1..22: mol_type = other DNA
accatgagtgaacttacaatgc

SEQ ID NO: 46555 - DNA, 22 bp, synthetic construct
  misc_feature 1..22: note = chemically synthesized
  source 1..22: mol_type = other DNA
acaatgcaagccccggggggat

SEQ ID NO: 46556 - DNA, 22 bp, synthetic construct
  misc_feature 1..22: note = chemically synthesized
  source 1..22: mol_type = other DNA
caatgcaagccccggggggatc

SEQ ID NO: 46557 - DNA, 22 bp, synthetic construct
  misc_feature 1..22: note = chemically synthesized
  source 1..22: mol_type = other DNA
gcagttttgtccctgtctgcag

SEQ ID NO: 46558 - DNA, 22 bp, synthetic construct
  misc_feature 1..22: note = chemically synthesized
  source 1..22: mol_type = other DNA
cagttttgtccctgtctgcagt

SEQ ID NO: 46559 - DNA, 22 bp, synthetic construct
  misc_feature 1..22: note = chemically synthesized
  source 1..22: mol_type = other DNA
tgtccctgtctgcagtgtgacc

SEQ ID NO: 46560 - DNA, 22 bp, synthetic construct
  misc_feature 1..22: note = chemically synthesized
  source 1..22: mol_type = other DNA
gtccctgtctgcagtgtgacct

SEQ ID NO: 46561 - DNA, 22 bp, synthetic construct
  misc_feature 1..22: note = chemically synthesized
  source 1..22: mol_type = other DNA
tccctgtctgcagtgtgacctg

SEQ ID NO: 46562 - DNA, 22 bp, synthetic construct
  misc_feature 1..22: note = chemically synthesized
  source 1..22: mol_type = other DNA
tctgcagtgtgacctgttggtg

SEQ ID NO: 46563 - DNA, 22 bp, synthetic construct
  misc_feature 1..22: note = chemically synthesized
  source 1..22: mol_type = other DNA
cagtgtgacctgttggtgacat

SEQ ID NO: 46564 - DNA, 22 bp, synthetic construct
  misc_feature 1..22: note = chemically synthesized
  source 1..22: mol_type = other DNA
ttggtgacattgtctttgctcc

SEQ ID NO: 46565 - DNA, 22 bp, synthetic construct
  misc_feature 1..22: note = chemically synthesized
  source 1..22: mol_type = other DNA
gtgacattgtctttgctccaaa

SEQ ID NO: 46566 - DNA, 22 bp, synthetic construct
  misc_feature 1..22: note = chemically synthesized
  source 1..22: mol_type = other DNA
tctttgctccaaaccacagctc

SEQ ID NO: 46567 - DNA, 22 bp, synthetic construct
  misc_feature 1..22: note = chemically synthesized
  source 1..22: mol_type = other DNA
tgctccaaaccacagctcctgg

SEQ ID NO: 46568 - DNA, 22 bp, synthetic construct
  misc_feature 1..22: note = chemically synthesized
  source 1..22: mol_type = other DNA
gctccaaaccacagctcctggg

SEQ ID NO: 46569 - DNA, 22 bp, synthetic construct
  misc_feature 1..22: note = chemically synthesized
  source 1..22: mol_type = other DNA
ctccaaaccacagctcctgggg

SEQ ID NO: 46570 - DNA, 22 bp, synthetic construct
  misc_feature 1..22: note = chemically synthesized
  source 1..22: mol_type = other DNA
caaaccacagctcctggggcag

SEQ ID NO: 46571 - DNA, 22 bp, synthetic construct
  misc_feature 1..22: note = chemically synthesized
  source 1..22: mol_type = other DNA
ctggggcagaggggaaaattct

SEQ ID NO: 46572 - DNA, 22 bp, synthetic construct
  misc_feature 1..22: note = chemically synthesized
  source 1..22: mol_type = other DNA
gggcagaggggaaaattctgcc

SEQ ID NO: 46573 - DNA, 22 bp, synthetic construct
  misc_feature 1..22: note = chemically synthesized
  source 1..22: mol_type = other DNA
tgccactcacagctgcctgccc

SEQ ID NO: 46574 - DNA, 22 bp, synthetic construct
  misc_feature 1..22: note = chemically synthesized
  source 1..22: mol_type = other DNA
ccactcacagctgcctgcccac

SEQ ID NO: 46575 - DNA, 22 bp, synthetic construct
  misc_feature 1..22: note = chemically synthesized
  source 1..22: mol_type = other DNA
acagctgcctgcccacgcttct

SEQ ID NO: 46576 - DNA, 22 bp, synthetic construct
  misc_feature 1..22: note = chemically synthesized
  source 1..22: mol_type = other DNA
cctgcccacgcttctgtctgag

SEQ ID NO: 46577 - DNA, 22 bp, synthetic construct
  misc_feature 1..22: note = chemically synthesized
  source 1..22: mol_type = other DNA
cccacgcttctgtctgagtgtg

SEQ ID NO: 46578 - DNA, 22 bp, synthetic construct
  misc_feature 1..22: note = chemically synthesized
  source 1..22: mol_type = other DNA
ctgtctgagtgtgctgggtggc

SEQ ID NO: 46579 - DNA, 22 bp, synthetic construct
  misc_feature 1..22: note = chemically synthesized
  source 1..22: mol_type = other DNA
tgtctgagtgtgctgggtggca

SEQ ID NO: 46580 - DNA, 22 bp, synthetic construct
  misc_feature 1..22: note = chemically synthesized
  source 1..22: mol_type = other DNA
tctgagtgtgctgggtggcagg

SEQ ID NO: 46581 - DNA, 22 bp, synthetic construct
  misc_feature 1..22: note = chemically synthesized
  source 1..22: mol_type = other DNA
agtgtgctgggtggcaggatgg

SEQ ID NO: 46582 - DNA, 22 bp, synthetic construct
  misc_feature 1..22: note = chemically synthesized
  source 1..22: mol_type = other DNA
ggtggcaggatggcaagtcctt

SEQ ID NO: 46583 - DNA, 22 bp, synthetic construct
  misc_feature 1..22: note = chemically synthesized
  source 1..22: mol_type = other DNA
actcagctcagtatagccctct

SEQ ID NO: 46584 - DNA, 22 bp, synthetic construct
  misc_feature 1..22: note = chemically synthesized
  source 1..22: mol_type = other DNA
ctcagctcagtatagccctctt

SEQ ID NO: 46585 - DNA, 22 bp, synthetic construct
  misc_feature 1..22: note = chemically synthesized
  source 1..22: mol_type = other DNA
agctcagtatagccctcttcct

SEQ ID NO: 46586 - DNA, 22 bp, synthetic construct
  misc_feature 1..22: note = chemically synthesized
  source 1..22: mol_type = other DNA
agtatagccctcttccttgttc

SEQ ID NO: 46587 - DNA, 22 bp, synthetic construct
  misc_feature 1..22: note = chemically synthesized
  source 1..22: mol_type = other DNA
ttccttgttccctgagcctttg

SEQ ID NO: 46588 - DNA, 22 bp, synthetic construct
  misc_feature 1..22: note = chemically synthesized
  source 1..22: mol_type = other DNA
ccttgttccctgagcctttgac

SEQ ID NO: 46589 - DNA, 22 bp, synthetic construct
  misc_feature 1..22: note = chemically synthesized
  source 1..22: mol_type = other DNA
cttgttccctgagcctttgact

SEQ ID NO: 46590 - DNA, 22 bp, synthetic construct
  misc_feature 1..22: note = chemically synthesized
  source 1..22: mol_type = other DNA
gttccctgagcctttgactttc

SEQ ID NO: 46591 - DNA, 22 bp, synthetic construct
  misc_feature 1..22: note = chemically synthesized
  source 1..22: mol_type = other DNA
ttccctgagcctttgactttct

SEQ ID NO: 46592 - DNA, 22 bp, synthetic construct
  misc_feature 1..22: note = chemically synthesized
  source 1..22: mol_type = other DNA
cctgagcctttgactttctcga

SEQ ID NO: 46593 - DNA, 22 bp, synthetic construct
  misc_feature 1..22: note = chemically synthesized
  source 1..22: mol_type = other DNA
agcctttgactttctcgaggga

SEQ ID NO: 46594 - DNA, 22 bp, synthetic construct
  misc_feature 1..22: note = chemically synthesized
  source 1..22: mol_type = other DNA
tgactttctcgagggatgttgt

SEQ ID NO: 46595 - DNA, 22 bp, synthetic construct
  misc_feature 1..22: note = chemically synthesized
  source 1..22: mol_type = other DNA
gactttctcgagggatgttgtg

SEQ ID NO: 46596 - DNA, 22 bp, synthetic construct
  misc_feature 1..22: note = chemically synthesized
  source 1..22: mol_type = other DNA
actttctcgagggatgttgtgg

SEQ ID NO: 46597 - DNA, 22 bp, synthetic construct
  misc_feature 1..22: note = chemically synthesized
  source 1..22: mol_type = other DNA
tctcgagggatgttgtggggtt

SEQ ID NO: 46598 - DNA, 22 bp, synthetic construct
  misc_feature 1..22: note = chemically synthesized
  source 1..22: mol_type = other DNA
ctcgagggatgttgtggggttg

SEQ ID NO: 46599 - DNA, 22 bp, synthetic construct
  misc_feature 1..22: note = chemically synthesized
  source 1..22: mol_type = other DNA
tcgagggatgttgtggggttgt

SEQ ID NO: 46600 - DNA, 22 bp, synthetic construct
  misc_feature 1..22: note = chemically synthesized
  source 1..22: mol_type = other DNA
gagggatgttgtggggttgtgg

SEQ ID NO: 46601 - DNA, 22 bp, synthetic construct
  misc_feature 1..22: note = chemically synthesized
  source 1..22: mol_type = other DNA
tggggttgtggccaggataaga

SEQ ID NO: 46602 - DNA, 22 bp, synthetic construct
  misc_feature 1..22: note = chemically synthesized
  source 1..22: mol_type = other DNA
tggccaggataagaaagggcat

SEQ ID NO: 46603 - DNA, 22 bp, synthetic construct
  misc_feature 1..22: note = chemically synthesized
  source 1..22: mol_type = other DNA
caagttaccactgctccaaaac

SEQ ID NO: 46604 - DNA, 22 bp, synthetic construct
  misc_feature 1..22: note = chemically synthesized
  source 1..22: mol_type = other DNA
aagttaccactgctccaaaaca

SEQ ID NO: 46605 - DNA, 22 bp, synthetic construct
  misc_feature 1..22: note = chemically synthesized
  source 1..22: mol_type = other DNA
ccactgctccaaaacaactgtt

SEQ ID NO: 46606 - DNA, 22 bp, synthetic construct
  misc_feature 1..22: note = chemically synthesized
  source 1..22: mol_type = other DNA
ctccaaaacaactgttctggaa

SEQ ID NO: 46607 - DNA, 22 bp, synthetic construct
  misc_feature 1..22: note = chemically synthesized
  source 1..22: mol_type = other DNA
caaaacaactgttctggaaata

SEQ ID NO: 46608 - DNA, 22 bp, synthetic construct
  misc_feature 1..22: note = chemically synthesized
  source 1..22: mol_type = other DNA
ttctggaaatagtgagtacccc

SEQ ID NO: 46609 - DNA, 22 bp, synthetic construct
  misc_feature 1..22: note = chemically synthesized
  source 1..22: mol_type = other DNA
tggaaatagtgagtaccccatc

SEQ ID NO: 46610 - DNA, 22 bp, synthetic construct
  misc_feature 1..22: note = chemically synthesized
  source 1..22: mol_type = other DNA
gaaatagtgagtaccccatcct

SEQ ID NO: 46611 - DNA, 22 bp, synthetic construct
  misc_feature 1..22: note = chemically synthesized
  source 1..22: mol_type = other DNA
agaggtgagtaagcagaggctg

SEQ ID NO: 46612 - DNA, 22 bp, synthetic construct
  misc_feature 1..22: note = chemically synthesized
  source 1..22: mol_type = other DNA
tatgaccacctgaaccaagccc

SEQ ID NO: 46613 - DNA, 22 bp, synthetic construct
  misc_feature 1..22: note = chemically synthesized
  source 1..22: mol_type = other DNA
aaccaagcccttgaggatgttt

SEQ ID NO: 46614 - DNA, 22 bp, synthetic construct
  misc_feature 1..22: note = chemically synthesized
  source 1..22: mol_type = other DNA
gaggatgtttcttctctggtgg

SEQ ID NO: 46615 - DNA, 22 bp, synthetic construct
  misc_feature 1..22: note = chemically synthesized
  source 1..22: mol_type = other DNA
aggatgtttcttctctggtgga

SEQ ID NO: 46616 - DNA, 22 bp, synthetic construct
  misc_feature 1..22: note = chemically synthesized
  source 1..22: mol_type = other DNA
cttctctggtggaagtttggaa

SEQ ID NO: 46617 - DNA, 22 bp, synthetic construct
  misc_feature 1..22: note = chemically synthesized
  source 1..22: mol_type = other DNA
ttctctggtggaagtttggaac

SEQ ID NO: 46618 - DNA, 22 bp, synthetic construct
  misc_feature 1..22: note = chemically synthesized
  source 1..22: mol_type = other DNA
ctctggtggaagtttggaacag

SEQ ID NO: 46619 - DNA, 22 bp, synthetic construct
  misc_feature 1..22: note = chemically synthesized
  source 1..22: mol_type = other DNA
tctggtggaagtttggaacagg

SEQ ID NO: 46620 - DNA, 22 bp, synthetic construct
  misc_feature 1..22: note = chemically synthesized
  source 1..22: mol_type = other DNA
tggtggaagtttggaacaggag

SEQ ID NO: 46621 - DNA, 22 bp, synthetic construct
  misc_feature 1..22: note = chemically synthesized
  source 1..22: mol_type = other DNA
gtggaagtttggaacaggagcc

SEQ ID NO: 46622 - DNA, 22 bp, synthetic construct
  misc_feature 1..22: note = chemically synthesized
  source 1..22: mol_type = other DNA
ggaacaggagcctcctcaagtt

SEQ ID NO: 46623 - DNA, 22 bp, synthetic construct
  misc_feature 1..22: note = chemically synthesized
  source 1..22: mol_type = other DNA
gaacaggagcctcctcaagttc

SEQ ID NO: 46624 - DNA, 22 bp, synthetic construct
  misc_feature 1..22: note = chemically synthesized
  source 1..22: mol_type = other DNA
ctcaagttcatttattcattca

SEQ ID NO: 46625 - DNA, 22 bp, synthetic construct
  misc_feature 1..22: note = chemically synthesized
  source 1..22: mol_type = other DNA
aagttcatttattcattcattc

SEQ ID NO: 46626 - DNA, 22 bp, synthetic construct
  misc_feature 1..22: note = chemically synthesized
  source 1..22: mol_type = other DNA
atttattcattcattcaatggt

SEQ ID NO: 46627 - DNA, 22 bp, synthetic construct
  misc_feature 1..22: note = chemically synthesized
  source 1..22: mol_type = other DNA
attcattcattcaatggttatt

SEQ ID NO: 46628 - DNA, 22 bp, synthetic construct
  misc_feature 1..22: note = chemically synthesized
  source 1..22: mol_type = other DNA
ttcattcattcaatggttattt

SEQ ID NO: 46629 - DNA, 22 bp, synthetic construct
  misc_feature 1..22: note = chemically synthesized
  source 1..22: mol_type = other DNA
attcattcaatggttattttgt

SEQ ID NO: 46630 - DNA, 22 bp, synthetic construct
  misc_feature 1..22: note = chemically synthesized
  source 1..22: mol_type = other DNA
attcaatggttattttgtggga

SEQ ID NO: 46631 - DNA, 22 bp, synthetic construct
  misc_feature 1..22: note = chemically synthesized
  source 1..22: mol_type = other DNA
aatggttattttgtgggaatcg

SEQ ID NO: 46632 - DNA, 22 bp, synthetic construct
  misc_feature 1..22: note = chemically synthesized
  source 1..22: mol_type = other DNA
ttttgtgggaatcgaatttaga

SEQ ID NO: 46633 - DNA, 22 bp, synthetic construct
  misc_feature 1..22: note = chemically synthesized
  source 1..22: mol_type = other DNA
tgtgggaatcgaatttagaatg

SEQ ID NO: 46634 - DNA, 22 bp, synthetic construct
  misc_feature 1..22: note = chemically synthesized
  source 1..22: mol_type = other DNA
gtgggaatcgaatttagaatga

SEQ ID NO: 46635 - DNA, 22 bp, synthetic construct
  misc_feature 1..22: note = chemically synthesized
  source 1..22: mol_type = other DNA
tgggaatcgaatttagaatgaa

SEQ ID NO: 46636 - DNA, 22 bp, synthetic construct
  misc_feature 1..22: note = chemically synthesized
  source 1..22: mol_type = other DNA
agaatgaaaatattttttggca

SEQ ID NO: 46637 - DNA, 22 bp, synthetic construct
  misc_feature 1..22: note = chemically synthesized
  source 1..22: mol_type = other DNA
gaatgaaaatattttttggcaa

SEQ ID NO: 46638 - DNA, 22 bp, synthetic construct
  misc_feature 1..22: note = chemically synthesized
  source 1..22: mol_type = other DNA
tttggcaagcagaaaataattt

SEQ ID NO: 46639 - DNA, 22 bp, synthetic construct
  misc_feature 1..22: note = chemically synthesized
  source 1..22: mol_type = other DNA
ttggcaagcagaaaataatttt

SEQ ID NO: 46640 - DNA, 22 bp, synthetic construct
  misc_feature 1..22: note = chemically synthesized
  source 1..22: mol_type = other DNA
tggcaagcagaaaataattttt

SEQ ID NO: 46641 - DNA, 22 bp, synthetic construct
  misc_feature 1..22: note = chemically synthesized
  source 1..22: mol_type = other DNA
ggcaagcagaaaataattttta

SEQ ID NO: 46642 - DNA, 22 bp, synthetic construct
  misc_feature 1..22: note = chemically synthesized
  source 1..22: mol_type = other DNA
gcaagcagaaaataatttttag

SEQ ID NO: 46643 - DNA, 22 bp, synthetic construct
  misc_feature 1..22: note = chemically synthesized
  source 1..22: mol_type = other DNA
ttagaccaatccttttctttta

SEQ ID NO: 46644 - DNA, 22 bp, synthetic construct
  misc_feature 1..22: note = chemically synthesized
  source 1..22: mol_type = other DNA
tagaccaatccttttcttttag

SEQ ID NO: 46645 - DNA, 22 bp, synthetic construct
  misc_feature 1..22: note = chemically synthesized
  source 1..22: mol_type = other DNA
agaccaatccttttcttttagt

SEQ ID NO: 46646 - DNA, 22 bp, synthetic construct
  misc_feature 1..22: note = chemically synthesized
  source 1..22: mol_type = other DNA
gaccaatccttttcttttagtc

SEQ ID NO: 46647 - DNA, 22 bp, synthetic construct
  misc_feature 1..22: note = chemically synthesized
  source 1..22: mol_type = other DNA
ttcttttagtcatgagaaactg

SEQ ID NO: 46648 - DNA, 22 bp, synthetic construct
  misc_feature 1..22: note = chemically synthesized
  source 1..22: mol_type = other DNA
tcttttagtcatgagaaactga

SEQ ID NO: 46649 - DNA, 22 bp, synthetic construct
  misc_feature 1..22: note = chemically synthesized
  source 1..22: mol_type = other DNA
cttttagtcatgagaaactgag

SEQ ID NO: 46650 - DNA, 22 bp, synthetic construct
  misc_feature 1..22: note = chemically synthesized
  source 1..22: mol_type = other DNA
ttttagtcatgagaaactgagg

SEQ ID NO: 46651 - DNA, 22 bp, synthetic construct
  misc_feature 1..22: note = chemically synthesized
  source 1..22: mol_type = other DNA
ttagtcatgagaaactgaggcc

SEQ ID NO: 46652 - DNA, 22 bp, synthetic construct
  misc_feature 1..22: note = chemically synthesized
  source 1..22: mol_type = other DNA
tagtcatgagaaactgaggccc

SEQ ID NO: 46653 - DNA, 22 bp, synthetic construct
  misc_feature 1..22: note = chemically synthesized
  source 1..22: mol_type = other DNA
agtcatgagaaactgaggccca

SEQ ID NO: 46654 - DNA, 22 bp, synthetic construct
  misc_feature 1..22: note = chemically synthesized
  source 1..22: mol_type = other DNA
gtcatgagaaactgaggcccag

SEQ ID NO: 46655 - DNA, 22 bp, synthetic construct
  misc_feature 1..22: note = chemically synthesized
  source 1..22: mol_type = other DNA
aggcccagagagaggaggtcac

SEQ ID NO: 46656 - DNA, 22 bp, synthetic construct
  misc_feature 1..22: note = chemically synthesized
  source 1..22: mol_type = other DNA
gaactgggtttccagaactgac

SEQ ID NO: 46657 - DNA, 22 bp, synthetic construct
  misc_feature 1..22: note = chemically synthesized
  source 1..22: mol_type = other DNA
ggtttccagaactgacactcca

SEQ ID NO: 46658 - DNA, 22 bp, synthetic construct
  misc_feature 1..22: note = chemically synthesized
  source 1..22: mol_type = other DNA
ccagaactgacactccactgca

SEQ ID NO: 46659 - DNA, 22 bp, synthetic construct
  misc_feature 1..22: note = chemically synthesized
  source 1..22: mol_type = other DNA
cagaactgacactccactgcac

SEQ ID NO: 46660 - DNA, 22 bp, synthetic construct
  misc_feature 1..22: note = chemically synthesized
  source 1..22: mol_type = other DNA
acactccactgcacagagtact

SEQ ID NO: 46661 - DNA, 22 bp, synthetic construct
  misc_feature 1..22: note = chemically synthesized
  source 1..22: mol_type = other DNA
cactgcacagagtactctccca

SEQ ID NO: 46662 - DNA, 22 bp, synthetic construct
  misc_feature 1..22: note = chemically synthesized
  source 1..22: mol_type = other DNA
cacagagtactctcccaattca

SEQ ID NO: 46663 - DNA, 22 bp, synthetic construct
  misc_feature 1..22: note = chemically synthesized
  source 1..22: mol_type = other DNA
tcccaattcattcaatttttat

SEQ ID NO: 46664 - DNA, 22 bp, synthetic construct
  misc_feature 1..22: note = chemically synthesized
  source 1..22: mol_type = other DNA
ccaattcattcaatttttattt

SEQ ID NO: 46665 - DNA, 22 bp, synthetic construct
  misc_feature 1..22: note = chemically synthesized
  source 1..22: mol_type = other DNA
attcaatttttatttagcggaa

SEQ ID NO: 46666 - DNA, 22 bp, synthetic construct
  misc_feature 1..22: note = chemically synthesized
  source 1..22: mol_type = other DNA
aatttttatttagcggaaggca

SEQ ID NO: 46667 - DNA, 22 bp, synthetic construct
  misc_feature 1..22: note = chemically synthesized
  source 1..22: mol_type = other DNA
ttatttagcggaaggcattttc

SEQ ID NO: 46668 - DNA, 22 bp, synthetic construct
  misc_feature 1..22: note = chemically synthesized
  source 1..22: mol_type = other DNA
tatttagcggaaggcattttca

SEQ ID NO: 46669 - DNA, 22 bp, synthetic construct
  misc_feature 1..22: note = chemically synthesized
  source 1..22: mol_type = other DNA
atttagcggaaggcattttcag

SEQ ID NO: 46670 - DNA, 22 bp, synthetic construct
  misc_feature 1..22: note = chemically synthesized
  source 1..22: mol_type = other DNA
tttagcggaaggcattttcaga

SEQ ID NO: 46671 - DNA, 22 bp, synthetic construct
  misc_feature 1..22: note = chemically synthesized
  source 1..22: mol_type = other DNA
agcggaaggcattttcagatgg

SEQ ID NO: 46672 - DNA, 22 bp, synthetic construct
  misc_feature 1..22: note = chemically synthesized
  source 1..22: mol_type = other DNA
gcggaaggcattttcagatggg

SEQ ID NO: 46673 - DNA, 22 bp, synthetic construct
  misc_feature 1..22: note = chemically synthesized
  source 1..22: mol_type = other DNA
tcagatgggtctttgaagcatt

SEQ ID NO: 46674 - DNA, 22 bp, synthetic construct
  misc_feature 1..22: note = chemically synthesized
  source 1..22: mol_type = other DNA
cagatgggtctttgaagcatta

SEQ ID NO: 46675 - DNA, 22 bp, synthetic construct
  misc_feature 1..22: note = chemically synthesized
  source 1..22: mol_type = other DNA
agatgggtctttgaagcattag

SEQ ID NO: 46676 - DNA, 22 bp, synthetic construct
  misc_feature 1..22: note = chemically synthesized
  source 1..22: mol_type = other DNA
tgaagcattagtaggagttcag

SEQ ID NO: 46677 - DNA, 22 bp, synthetic construct
  misc_feature 1..22: note = chemically synthesized
  source 1..22: mol_type = other DNA
gaagcattagtaggagttcagc

SEQ ID NO: 46678 - DNA, 22 bp, synthetic construct
  misc_feature 1..22: note = chemically synthesized
  source 1..22: mol_type = other DNA
aagcattagtaggagttcagcg

SEQ ID NO: 46679 - DNA, 22 bp, synthetic construct
  misc_feature 1..22: note = chemically synthesized
  source 1..22: mol_type = other DNA
gtaggagttcagcgatgatggt

SEQ ID NO: 46680 - DNA, 22 bp, synthetic construct
  misc_feature 1..22: note = chemically synthesized
  source 1..22: mol_type = other DNA
agcgatgatggtgtcatgagaa

SEQ ID NO: 46681 - DNA, 22 bp, synthetic construct
  misc_feature 1..22: note = chemically synthesized
  source 1..22: mol_type = other DNA
tattctaggattaggaggtacc

SEQ ID NO: 46682 - DNA, 22 bp, synthetic construct
  misc_feature 1..22: note = chemically synthesized
  source 1..22: mol_type = other DNA
attctaggattaggaggtacca

SEQ ID NO: 46683 - DNA, 22 bp, synthetic construct
  misc_feature 1..22: note = chemically synthesized
  source 1..22: mol_type = other DNA
ttctaggattaggaggtaccat

SEQ ID NO: 46684 - DNA, 22 bp, synthetic construct
  misc_feature 1..22: note = chemically synthesized
  source 1..22: mol_type = other DNA
taggattaggaggtaccatgaa

SEQ ID NO: 46685 - DNA, 22 bp, synthetic construct
  misc_feature 1..22: note = chemically synthesized
  source 1..22: mol_type = other DNA
ggattaggaggtaccatgaaca

SEQ ID NO: 46686 - DNA, 22 bp, synthetic construct
  misc_feature 1..22: note = chemically synthesized
  source 1..22: mol_type = other DNA
ggaggtaccatgaacaaagata

SEQ ID NO: 46687 - DNA, 22 bp, synthetic construct
  misc_feature 1..22: note = chemically synthesized
  source 1..22: mol_type = other DNA
ggaaaaccagaggtggaagata

SEQ ID NO: 46688 - DNA, 22 bp, synthetic construct
  misc_feature 1..22: note = chemically synthesized
  source 1..22: mol_type = other DNA
tttttcttttttttttgagatg

SEQ ID NO: 46689 - DNA, 22 bp, synthetic construct
  misc_feature 1..22: note = chemically synthesized
  source 1..22: mol_type = other DNA
tttcttttttttttgagatgga

SEQ ID NO: 46690 - DNA, 22 bp, synthetic construct
  misc_feature 1..22: note = chemically synthesized
  source 1..22: mol_type = other DNA
ttcttttttttttgagatggag

SEQ ID NO: 46691 - DNA, 22 bp, synthetic construct
  misc_feature 1..22: note = chemically synthesized
  source 1..22: mol_type = other DNA
tcttttttttttgagatggagt

SEQ ID NO: 46692 - DNA, 22 bp, synthetic construct
  misc_feature 1..22: note = chemically synthesized
  source 1..22: mol_type = other DNA
cttttttttttgagatggagtt

SEQ ID NO: 46693 - DNA, 22 bp, synthetic construct
  misc_feature 1..22: note = chemically synthesized
  source 1..22: mol_type = other DNA
ttttttttttgagatggagttt

SEQ ID NO: 46694 - DNA, 22 bp, synthetic construct
  misc_feature 1..22: note = chemically synthesized
  source 1..22: mol_type = other DNA
ttttttttgagatggagtttcg

SEQ ID NO: 46695 - DNA, 22 bp, synthetic construct
  misc_feature 1..22: note = chemically synthesized
  source 1..22: mol_type = other DNA
tttttttgagatggagtttcgc

SEQ ID NO: 46696 - DNA, 22 bp, synthetic construct
  misc_feature 1..22: note = chemically synthesized
  source 1..22: mol_type = other DNA
ttttttgagatggagtttcgct

SEQ ID NO: 46697 - DNA, 22 bp, synthetic construct
  misc_feature 1..22: note = chemically synthesized
  source 1..22: mol_type = other DNA
tttttgagatggagtttcgctc

SEQ ID NO: 46698 - DNA, 22 bp, synthetic construct
  misc_feature 1..22: note = chemically synthesized
  source 1..22: mol_type = other DNA
ttttgagatggagtttcgctct

SEQ ID NO: 46699 - DNA, 22 bp, synthetic construct
  misc_feature 1..22: note = chemically synthesized
  source 1..22: mol_type = other DNA
tttgagatggagtttcgctctt

SEQ ID NO: 46700 - DNA, 22 bp, synthetic construct
  misc_feature 1..22: note = chemically synthesized
  source 1..22: mol_type = other DNA
ttgagatggagtttcgctcttg

SEQ ID NO: 46701 - DNA, 22 bp, synthetic construct
  misc_feature 1..22: note = chemically synthesized
  source 1..22: mol_type = other DNA
tgagatggagtttcgctcttgt

SEQ ID NO: 46702 - DNA, 22 bp, synthetic construct
  misc_feature 1..22: note = chemically synthesized
  source 1..22: mol_type = other DNA
gagatggagtttcgctcttgtt

SEQ ID NO: 46703 - DNA, 22 bp, synthetic construct
  misc_feature 1..22: note = chemically synthesized
  source 1..22: mol_type = other DNA
agatggagtttcgctcttgttg

SEQ ID NO: 46704 - DNA, 22 bp, synthetic construct
  misc_feature 1..22: note = chemically synthesized
  source 1..22: mol_type = other DNA
cgctcttgttgcccaggctgga

SEQ ID NO: 46705 - DNA, 22 bp, synthetic construct
  misc_feature 1..22: note = chemically synthesized
  source 1..22: mol_type = other DNA
gctcttgttgcccaggctggag

SEQ ID NO: 46706 - DNA, 22 bp, synthetic construct
  misc_feature 1..22: note = chemically synthesized
  source 1..22: mol_type = other DNA
ttgttgcccaggctggagtgca

SEQ ID NO: 46707 - DNA, 22 bp, synthetic construct
  misc_feature 1..22: note = chemically synthesized
  source 1..22: mol_type = other DNA
gttgcccaggctggagtgcaat

SEQ ID NO: 46708 - DNA, 22 bp, synthetic construct
  misc_feature 1..22: note = chemically synthesized
  source 1..22: mol_type = other DNA
ttgcccaggctggagtgcaatg

SEQ ID NO: 46709 - DNA, 22 bp, synthetic construct
  misc_feature 1..22: note = chemically synthesized
  source 1..22: mol_type = other DNA
cccaggctggagtgcaatggtg

SEQ ID NO: 46710 - DNA, 22 bp, synthetic construct
  misc_feature 1..22: note = chemically synthesized
  source 1..22: mol_type = other DNA
gagtgcaatggtgcagtctcag

SEQ ID NO: 46711 - DNA, 22 bp, synthetic construct
  misc_feature 1..22: note = chemically synthesized
  source 1..22: mol_type = other DNA
agctcactgcaacatctgtctc

SEQ ID NO: 46712 - DNA, 22 bp, synthetic construct
  misc_feature 1..22: note = chemically synthesized
  source 1..22: mol_type = other DNA
actgcaacatctgtctcccggg

SEQ ID NO: 46713 - DNA, 22 bp, synthetic construct
  misc_feature 1..22: note = chemically synthesized
  source 1..22: mol_type = other DNA
caacatctgtctcccgggttca

SEQ ID NO: 46714 - DNA, 22 bp, synthetic construct
  misc_feature 1..22: note = chemically synthesized
  source 1..22: mol_type = other DNA
tctcccgggttcaagtggttct

SEQ ID NO: 46715 - DNA, 22 bp, synthetic construct
  misc_feature 1..22: note = chemically synthesized
  source 1..22: mol_type = other DNA
ccgggttcaagtggttctcctg

SEQ ID NO: 46716 - DNA, 22 bp, synthetic construct
  misc_feature 1..22: note = chemically synthesized
  source 1..22: mol_type = other DNA
aagtggttctcctgcctcagcc

SEQ ID NO: 46717 - DNA, 22 bp, synthetic construct
  misc_feature 1..22: note = chemically synthesized
  source 1..22: mol_type = other DNA
tcctgcctcagcctcccaagaa

SEQ ID NO: 46718 - DNA, 22 bp, synthetic construct
  misc_feature 1..22: note = chemically synthesized
  source 1..22: mol_type = other DNA
ctgcctcagcctcccaagaagc

SEQ ID NO: 46719 - DNA, 22 bp, synthetic construct
  misc_feature 1..22: note = chemically synthesized
  source 1..22: mol_type = other DNA
cctcagcctcccaagaagctgg

SEQ ID NO: 46720 - DNA, 22 bp, synthetic construct
  misc_feature 1..22: note = chemically synthesized
  source 1..22: mol_type = other DNA
agcctcccaagaagctgggatt

SEQ ID NO: 46721 - DNA, 22 bp, synthetic construct
  misc_feature 1..22: note = chemically synthesized
  source 1..22: mol_type = other DNA
ccaagaagctgggattacaggt

SEQ ID NO: 46722 - DNA, 22 bp, synthetic construct
  misc_feature 1..22: note = chemically synthesized
  source 1..22: mol_type = other DNA
ggattacaggtacctgccacca

SEQ ID NO: 46723 - DNA, 22 bp, synthetic construct
  misc_feature 1..22: note = chemically synthesized
  source 1..22: mol_type = other DNA
caggtacctgccaccacgcccg

SEQ ID NO: 46724 - DNA, 22 bp, synthetic construct
  misc_feature 1..22: note = chemically synthesized
  source 1..22: mol_type = other DNA
ccaccacgcccggctaattttt

SEQ ID NO: 46725 - DNA, 22 bp, synthetic construct
  misc_feature 1..22: note = chemically synthesized
  source 1..22: mol_type = other DNA
atttttgtatttttagtagaga

SEQ ID NO: 46726 - DNA, 22 bp, synthetic construct
  misc_feature 1..22: note = chemically synthesized
  source 1..22: mol_type = other DNA
ttgtatttttagtagagaaggg

SEQ ID NO: 46727 - DNA, 22 bp, synthetic construct
  misc_feature 1..22: note = chemically synthesized
  source 1..22: mol_type = other DNA
tgtatttttagtagagaagggg

SEQ ID NO: 46728 - DNA, 22 bp, synthetic construct
  misc_feature 1..22: note = chemically synthesized
  source 1..22: mol_type = other DNA
gtatttttagtagagaaggggt

SEQ ID NO: 46729 - DNA, 22 bp, synthetic construct
  misc_feature 1..22: note = chemically synthesized
  source 1..22: mol_type = other DNA
tatttttagtagagaaggggtt

SEQ ID NO: 46730 - DNA, 22 bp, synthetic construct
  misc_feature 1..22: note = chemically synthesized
  source 1..22: mol_type = other DNA
ttagtagagaaggggtttcacc

SEQ ID NO: 46731 - DNA, 22 bp, synthetic construct
  misc_feature 1..22: note = chemically synthesized
  source 1..22: mol_type = other DNA
tagtagagaaggggtttcacca

SEQ ID NO: 46732 - DNA, 22 bp, synthetic construct
  misc_feature 1..22: note = chemically synthesized
  source 1..22: mol_type = other DNA
agtagagaaggggtttcaccac

SEQ ID NO: 46733 - DNA, 22 bp, synthetic construct
  misc_feature 1..22: note = chemically synthesized
  source 1..22: mol_type = other DNA
gtagagaaggggtttcaccacg

SEQ ID NO: 46734 - DNA, 22 bp, synthetic construct
  misc_feature 1..22: note = chemically synthesized
  source 1..22: mol_type = other DNA
caccacgttggccaggctagtc

SEQ ID NO: 46735 - DNA, 22 bp, synthetic construct
  misc_feature 1..22: note = chemically synthesized
  source 1..22: mol_type = other DNA
accacgttggccaggctagtcg

SEQ ID NO: 46736 - DNA, 22 bp, synthetic construct
  misc_feature 1..22: note = chemically synthesized
  source 1..22: mol_type = other DNA
gccaggctagtcgcaaactcct

SEQ ID NO: 46737 - DNA, 22 bp, synthetic construct
  misc_feature 1..22: note = chemically synthesized
  source 1..22: mol_type = other DNA
gtcgcaaactcctgacctcctc

SEQ ID NO: 46738 - DNA, 22 bp, synthetic construct
  misc_feature 1..22: note = chemically synthesized
  source 1..22: mol_type = other DNA
ctgacctcctcagtggatccga

SEQ ID NO: 46739 - DNA, 22 bp, synthetic construct
  misc_feature 1..22: note = chemically synthesized
  source 1..22: mol_type = other DNA
acctcctcagtggatccgagga

SEQ ID NO: 46740 - DNA, 22 bp, synthetic construct
  misc_feature 1..22: note = chemically synthesized
  source 1..22: mol_type = other DNA
ctcagtggatccgaggaggtga

SEQ ID NO: 46741 - DNA, 22 bp, synthetic construct
  misc_feature 1..22: note = chemically synthesized
  source 1..22: mol_type = other DNA
agtggatccgaggaggtgatcc

SEQ ID NO: 46742 - DNA, 22 bp, synthetic construct
  misc_feature 1..22: note = chemically synthesized
  source 1..22: mol_type = other DNA
ccgcctcagcctcccaaagtgc

SEQ ID NO: 46743 - DNA, 22 bp, synthetic construct
  misc_feature 1..22: note = chemically synthesized
  source 1..22: mol_type = other DNA
agcctcccaaagtgctcgaatt

SEQ ID NO: 46744 - DNA, 22 bp, synthetic construct
  misc_feature 1..22: note = chemically synthesized
  source 1..22: mol_type = other DNA
ccaaagtgctcgaattacaggt

SEQ ID NO: 46745 - DNA, 22 bp, synthetic construct
  misc_feature 1..22: note = chemically synthesized
  source 1..22: mol_type = other DNA
gaattacaggtgtgagccacca

SEQ ID NO: 46746 - DNA, 22 bp, synthetic construct
  misc_feature 1..22: note = chemically synthesized
  source 1..22: mol_type = other DNA
caggtgtgagccaccacgcctg

SEQ ID NO: 46747 - DNA, 22 bp, synthetic construct
  misc_feature 1..22: note = chemically synthesized
  source 1..22: mol_type = other DNA
gcctccacagttctttatccac

SEQ ID NO: 46748 - DNA, 22 bp, synthetic construct
  misc_feature 1..22: note = chemically synthesized
  source 1..22: mol_type = other DNA
cacagttctttatccaccgtct

SEQ ID NO: 46749 - DNA, 22 bp, synthetic construct
  misc_feature 1..22: note = chemically synthesized
  source 1..22: mol_type = other DNA
tttatccaccgtctgaaatgta

SEQ ID NO: 46750 - DNA, 22 bp, synthetic construct
  misc_feature 1..22: note = chemically synthesized
  source 1..22: mol_type = other DNA
tatccaccgtctgaaatgtaaa

SEQ ID NO: 46751 - DNA, 22 bp, synthetic construct
  misc_feature 1..22: note = chemically synthesized
  source 1..22: mol_type = other DNA
atccaccgtctgaaatgtaaaa

SEQ ID NO: 46752 - DNA, 22 bp, synthetic construct
  misc_feature 1..22: note = chemically synthesized
  source 1..22: mol_type = other DNA
tccaccgtctgaaatgtaaaat

SEQ ID NO: 46753 - DNA, 22 bp, synthetic construct
  misc_feature 1..22: note = chemically synthesized
  source 1..22: mol_type = other DNA
aaatgtaaaatgttacgaaaac

SEQ ID NO: 46754 - DNA, 22 bp, synthetic construct
  misc_feature 1..22: note = chemically synthesized
  source 1..22: mol_type = other DNA
cgaaaaccaaaagttttttttg

SEQ ID NO: 46755 - DNA, 22 bp, synthetic construct
  misc_feature 1..22: note = chemically synthesized
  source 1..22: mol_type = other DNA
tttttgtgatttatttgatggt

SEQ ID NO: 46756 - DNA, 22 bp, synthetic construct
  misc_feature 1..22: note = chemically synthesized
  source 1..22: mol_type = other DNA
ttttgtgatttatttgatggta

SEQ ID NO: 46757 - DNA, 22 bp, synthetic construct
  misc_feature 1..22: note = chemically synthesized
  source 1..22: mol_type = other DNA
tttgtgatttatttgatggtag

SEQ ID NO: 46758 - DNA, 22 bp, synthetic construct
  misc_feature 1..22: note = chemically synthesized
  source 1..22: mol_type = other DNA
ttgtgatttatttgatggtagc

SEQ ID NO: 46759 - DNA, 22 bp, synthetic construct
  misc_feature 1..22: note = chemically synthesized
  source 1..22: mol_type = other DNA
tgtgatttatttgatggtagca

SEQ ID NO: 46760 - DNA, 22 bp, synthetic construct
  misc_feature 1..22: note = chemically synthesized
  source 1..22: mol_type = other DNA
gtgatttatttgatggtagcac

SEQ ID NO: 46761 - DNA, 22 bp, synthetic construct
  misc_feature 1..22: note = chemically synthesized
  source 1..22: mol_type = other DNA
tgatttatttgatggtagcacc

SEQ ID NO: 46762 - DNA, 22 bp, synthetic construct
  misc_feature 1..22: note = chemically synthesized
  source 1..22: mol_type = other DNA
atttgatggtagcacctgacgt

SEQ ID NO: 46763 - DNA, 22 bp, synthetic construct
  misc_feature 1..22: note = chemically synthesized
  source 1..22: mol_type = other DNA
tttgatggtagcacctgacgtg

SEQ ID NO: 46764 - DNA, 22 bp, synthetic construct
  misc_feature 1..22: note = chemically synthesized
  source 1..22: mol_type = other DNA
gatggtagcacctgacgtgaac

SEQ ID NO: 46765 - DNA, 22 bp, synthetic construct
  misc_feature 1..22: note = chemically synthesized
  source 1..22: mol_type = other DNA
atggtagcacctgacgtgaact

SEQ ID NO: 46766 - DNA, 22 bp, synthetic construct
  misc_feature 1..22: note = chemically synthesized
  source 1..22: mol_type = other DNA
acgtgaactgacatgagattat

SEQ ID NO: 46767 - DNA, 22 bp, synthetic construct
  misc_feature 1..22: note = chemically synthesized
  source 1..22: mol_type = other DNA
acatgagattatttttaattta

SEQ ID NO: 46768 - DNA, 22 bp, synthetic construct
  misc_feature 1..22: note = chemically synthesized
  source 1..22: mol_type = other DNA
tttttaatttagttgtgtgaat

SEQ ID NO: 46769 - DNA, 22 bp, synthetic construct
  misc_feature 1..22: note = chemically synthesized
  source 1..22: mol_type = other DNA
ttaatttagttgtgtgaatatg

SEQ ID NO: 46770 - DNA, 22 bp, synthetic construct
  misc_feature 1..22: note = chemically synthesized
  source 1..22: mol_type = other DNA
taatttagttgtgtgaatatgc

SEQ ID NO: 46771 - DNA, 22 bp, synthetic construct
  misc_feature 1..22: note = chemically synthesized
  source 1..22: mol_type = other DNA
aatttagttgtgtgaatatgca

SEQ ID NO: 46772 - DNA, 22 bp, synthetic construct
  misc_feature 1..22: note = chemically synthesized
  source 1..22: mol_type = other DNA
atttagttgtgtgaatatgcat

SEQ ID NO: 46773 - DNA, 22 bp, synthetic construct
  misc_feature 1..22: note = chemically synthesized
  source 1..22: mol_type = other DNA
agttgtgtgaatatgcatattc

SEQ ID NO: 46774 - DNA, 22 bp, synthetic construct
  misc_feature 1..22: note = chemically synthesized
  source 1..22: mol_type = other DNA
gttgtgtgaatatgcatattca

SEQ ID NO: 46775 - DNA, 22 bp, synthetic construct
  misc_feature 1..22: note = chemically synthesized
  source 1..22: mol_type = other DNA
tgtgaatatgcatattcatata

SEQ ID NO: 46776 - DNA, 22 bp, synthetic construct
  misc_feature 1..22: note = chemically synthesized
  source 1..22: mol_type = other DNA
atatattttgctgcatagatta

SEQ ID NO: 46777 - DNA, 22 bp, synthetic construct
  misc_feature 1..22: note = chemically synthesized
  source 1..22: mol_type = other DNA
tgctgcatagattacagtatgc

SEQ ID NO: 46778 - DNA, 22 bp, synthetic construct
  misc_feature 1..22: note = chemically synthesized
  source 1..22: mol_type = other DNA
gctgcatagattacagtatgca

SEQ ID NO: 46779 - DNA, 22 bp, synthetic construct
  misc_feature 1..22: note = chemically synthesized
  source 1..22: mol_type = other DNA
ctgcatagattacagtatgcag

SEQ ID NO: 46780 - DNA, 22 bp, synthetic construct
  misc_feature 1..22: note = chemically synthesized
  source 1..22: mol_type = other DNA
catagattacagtatgcagctc

SEQ ID NO: 46781 - DNA, 22 bp, synthetic construct
  misc_feature 1..22: note = chemically synthesized
  source 1..22: mol_type = other DNA
cagtatgcagctccagattctt

SEQ ID NO: 46782 - DNA, 22 bp, synthetic construct
  misc_feature 1..22: note = chemically synthesized
  source 1..22: mol_type = other DNA
cagattcttccaagcagactct

SEQ ID NO: 46783 - DNA, 22 bp, synthetic construct
  misc_feature 1..22: note = chemically synthesized
  source 1..22: mol_type = other DNA
ttccaagcagactctgattgcc

SEQ ID NO: 46784 - DNA, 22 bp, synthetic construct
  misc_feature 1..22: note = chemically synthesized
  source 1..22: mol_type = other DNA
ccaagcagactctgattgccca

SEQ ID NO: 46785 - DNA, 22 bp, synthetic construct
  misc_feature 1..22: note = chemically synthesized
  source 1..22: mol_type = other DNA
caagcagactctgattgcccat

SEQ ID NO: 46786 - DNA, 22 bp, synthetic construct
  misc_feature 1..22: note = chemically synthesized
  source 1..22: mol_type = other DNA
tgattgcccattactgcctttc

SEQ ID NO: 46787 - DNA, 22 bp, synthetic construct
  misc_feature 1..22: note = chemically synthesized
  source 1..22: mol_type = other DNA
attgcccattactgcctttcta

SEQ ID NO: 46788 - DNA, 22 bp, synthetic construct
  misc_feature 1..22: note = chemically synthesized
  source 1..22: mol_type = other DNA
cccattactgcctttctaaaat

SEQ ID NO: 46789 - DNA, 22 bp, synthetic construct
  misc_feature 1..22: note = chemically synthesized
  source 1..22: mol_type = other DNA
ctgcctttctaaaatccaaaca

SEQ ID NO: 46790 - DNA, 22 bp, synthetic construct
  misc_feature 1..22: note = chemically synthesized
  source 1..22: mol_type = other DNA
cctttctaaaatccaaacaagt

SEQ ID NO: 46791 - DNA, 22 bp, synthetic construct
  misc_feature 1..22: note = chemically synthesized
  source 1..22: mol_type = other DNA
tctaaaatccaaacaagttctg

SEQ ID NO: 46792 - DNA, 22 bp, synthetic construct
  misc_feature 1..22: note = chemically synthesized
  source 1..22: mol_type = other DNA
ctaaaatccaaacaagttctga

SEQ ID NO: 46793 - DNA, 22 bp, synthetic construct
  misc_feature 1..22: note = chemically synthesized
  source 1..22: mol_type = other DNA
taaaatccaaacaagttctgag

SEQ ID NO: 46794 - DNA, 22 bp, synthetic construct
  misc_feature 1..22: note = chemically synthesized
  source 1..22: mol_type = other DNA
aaatccaaacaagttctgaggt

SEQ ID NO: 46795 - DNA, 22 bp, synthetic construct
  misc_feature 1..22: note = chemically synthesized
  source 1..22: mol_type = other DNA
tgaggttcaaaaccgttttggc

SEQ ID NO: 46796 - DNA, 22 bp, synthetic construct
  misc_feature 1..22: note = chemically synthesized
  source 1..22: mol_type = other DNA
aggttcaaaaccgttttggccc

SEQ ID NO: 46797 - DNA, 22 bp, synthetic construct
  misc_feature 1..22: note = chemically synthesized
  source 1..22: mol_type = other DNA
aaaaccgttttggccctaaggc

SEQ ID NO: 46798 - DNA, 22 bp, synthetic construct
  misc_feature 1..22: note = chemically synthesized
  source 1..22: mol_type = other DNA
tggccctaaggctttgggtaaa

SEQ ID NO: 46799 - DNA, 22 bp, synthetic construct
  misc_feature 1..22: note = chemically synthesized
  source 1..22: mol_type = other DNA
ggccctaaggctttgggtaaag

SEQ ID NO: 46800 - DNA, 22 bp, synthetic construct
  misc_feature 1..22: note = chemically synthesized
  source 1..22: mol_type = other DNA
gccctaaggctttgggtaaagg

SEQ ID NO: 46801 - DNA, 22 bp, synthetic construct
  misc_feature 1..22: note = chemically synthesized
  source 1..22: mol_type = other DNA
aggctttgggtaaagggggtgg

SEQ ID NO: 46802 - DNA, 22 bp, synthetic construct
  misc_feature 1..22: note = chemically synthesized
  source 1..22: mol_type = other DNA
tgggtaaagggggtggactctg

SEQ ID NO: 46803 - DNA, 22 bp, synthetic construct
  misc_feature 1..22: note = chemically synthesized
  source 1..22: mol_type = other DNA
gggtaaagggggtggactctgt

SEQ ID NO: 46804 - DNA, 22 bp, synthetic construct
  misc_feature 1..22: note = chemically synthesized
  source 1..22: mol_type = other DNA
ggtaaagggggtggactctgtt

SEQ ID NO: 46805 - DNA, 22 bp, synthetic construct
  misc_feature 1..22: note = chemically synthesized
  source 1..22: mol_type = other DNA
tgttctactctgactggagtcc

SEQ ID NO: 46806 - DNA, 22 bp, synthetic construct
  misc_feature 1..22: note = chemically synthesized
  source 1..22: mol_type = other DNA
ttctactctgactggagtccaa

SEQ ID NO: 46807 - DNA, 22 bp, synthetic construct
  misc_feature 1..22: note = chemically synthesized
  source 1..22: mol_type = other DNA
tactctgactggagtccaagat

SEQ ID NO: 46808 - DNA, 22 bp, synthetic construct
  misc_feature 1..22: note = chemically synthesized
  source 1..22: mol_type = other DNA
ctctgactggagtccaagatgc

SEQ ID NO: 46809 - DNA, 22 bp, synthetic construct
  misc_feature 1..22: note = chemically synthesized
  source 1..22: mol_type = other DNA
tgactggagtccaagatgcata

SEQ ID NO: 46810 - DNA, 22 bp, synthetic construct
  misc_feature 1..22: note = chemically synthesized
  source 1..22: mol_type = other DNA
actggagtccaagatgcatata

SEQ ID NO: 46811 - DNA, 22 bp, synthetic construct
  misc_feature 1..22: note = chemically synthesized
  source 1..22: mol_type = other DNA
gagtccaagatgcatatataca

SEQ ID NO: 46812 - DNA, 22 bp, synthetic construct
  misc_feature 1..22: note = chemically synthesized
  source 1..22: mol_type = other DNA
caaggtaggttgaggtaggggc

SEQ ID NO: 46813 - DNA, 22 bp, synthetic construct
  misc_feature 1..22: note = chemically synthesized
  source 1..22: mol_type = other DNA
aggtaggggccaaggaggagca

SEQ ID NO: 46814 - DNA, 22 bp, synthetic construct
  misc_feature 1..22: note = chemically synthesized
  source 1..22: mol_type = other DNA
ggacttgattcatgaggctgtg

SEQ ID NO: 46815 - DNA, 22 bp, synthetic construct
  misc_feature 1..22: note = chemically synthesized
  source 1..22: mol_type = other DNA
gacttgattcatgaggctgtgg

SEQ ID NO: 46816 - DNA, 22 bp, synthetic construct
  misc_feature 1..22: note = chemically synthesized
  source 1..22: mol_type = other DNA
gattcatgaggctgtggggagc

SEQ ID NO: 46817 - DNA, 22 bp, synthetic construct
  misc_feature 1..22: note = chemically synthesized
  source 1..22: mol_type = other DNA
attcatgaggctgtggggagcc

SEQ ID NO: 46818 - DNA, 22 bp, synthetic construct
  misc_feature 1..22: note = chemically synthesized
  source 1..22: mol_type = other DNA
atgaggctgtggggagccagtg

SEQ ID NO: 46819 - DNA, 22 bp, synthetic construct
  misc_feature 1..22: note = chemically synthesized
  source 1..22: mol_type = other DNA
tggggagccagtgaaggttctt

SEQ ID NO: 46820 - DNA, 22 bp, synthetic construct
  misc_feature 1..22: note = chemically synthesized
  source 1..22: mol_type = other DNA
ttaagcaggtatgtctgcctga

SEQ ID NO: 46821 - DNA, 22 bp, synthetic construct
  misc_feature 1..22: note = chemically synthesized
  source 1..22: mol_type = other DNA
aagcaggtatgtctgcctgaga

SEQ ID NO: 46822 - DNA, 22 bp, synthetic construct
  misc_feature 1..22: note = chemically synthesized
  source 1..22: mol_type = other DNA
agcaggtatgtctgcctgagag

SEQ ID NO: 46823 - DNA, 22 bp, synthetic construct
  misc_feature 1..22: note = chemically synthesized
  source 1..22: mol_type = other DNA
cctgagagcagttggagcagac

SEQ ID NO: 46824 - DNA, 22 bp, synthetic construct
  misc_feature 1..22: note = chemically synthesized
  source 1..22: mol_type = other DNA
agagcagttggagcagacaaga

SEQ ID NO: 46825 - DNA, 22 bp, synthetic construct
  misc_feature 1..22: note = chemically synthesized
  source 1..22: mol_type = other DNA
gagcagacaagagctaaaaacc

SEQ ID NO: 46826 - DNA, 22 bp, synthetic construct
  misc_feature 1..22: note = chemically synthesized
  source 1..22: mol_type = other DNA
aaaaccaaacaaatcaccatag

SEQ ID NO: 46827 - DNA, 22 bp, synthetic construct
  misc_feature 1..22: note = chemically synthesized
  source 1..22: mol_type = other DNA
ctataatttgtttgtcccctcc

SEQ ID NO: 46828 - DNA, 22 bp, synthetic construct
  misc_feature 1..22: note = chemically synthesized
  source 1..22: mol_type = other DNA
taatttgtttgtcccctccaaa

SEQ ID NO: 46829 - DNA, 22 bp, synthetic construct
  misc_feature 1..22: note = chemically synthesized
  source 1..22: mol_type = other DNA
gtttgtcccctccaaatctcat

SEQ ID NO: 46830 - DNA, 22 bp, synthetic construct
  misc_feature 1..22: note = chemically synthesized
  source 1..22: mol_type = other DNA
tttgtcccctccaaatctcatg

SEQ ID NO: 46831 - DNA, 22 bp, synthetic construct
  misc_feature 1..22: note = chemically synthesized
  source 1..22: mol_type = other DNA
gtcccctccaaatctcatgtgg

SEQ ID NO: 46832 - DNA, 22 bp, synthetic construct
  misc_feature 1..22: note = chemically synthesized
  source 1..22: mol_type = other DNA
tcccctccaaatctcatgtgga

SEQ ID NO: 46833 - DNA, 22 bp, synthetic construct
  misc_feature 1..22: note = chemically synthesized
  source 1..22: mol_type = other DNA
caaatctcatgtggaaatttgg

SEQ ID NO: 46834 - DNA, 22 bp, synthetic construct
  misc_feature 1..22: note = chemically synthesized
  source 1..22: mol_type = other DNA
atgtggaaatttggtcctcagt

SEQ ID NO: 46835 - DNA, 22 bp, synthetic construct
  misc_feature 1..22: note = chemically synthesized
  source 1..22: mol_type = other DNA
ggtcctcagtgttggaagtggg

SEQ ID NO: 46836 - DNA, 22 bp, synthetic construct
  misc_feature 1..22: note = chemically synthesized
  source 1..22: mol_type = other DNA
gtcctcagtgttggaagtgggg

SEQ ID NO: 46837 - DNA, 22 bp, synthetic construct
  misc_feature 1..22: note = chemically synthesized
  source 1..22: mol_type = other DNA
agtgttggaagtggggcctaat

SEQ ID NO: 46838 - DNA, 22 bp, synthetic construct
  misc_feature 1..22: note = chemically synthesized
  source 1..22: mol_type = other DNA
gaagtggggcctaatgggaggt

SEQ ID NO: 46839 - DNA, 22 bp, synthetic construct
  misc_feature 1..22: note = chemically synthesized
  source 1..22: mol_type = other DNA
atgggaggtgtttgggtcatgg

SEQ ID NO: 46840 - DNA, 22 bp, synthetic construct
  misc_feature 1..22: note = chemically synthesized
  source 1..22: mol_type = other DNA
gggtcatgggggaggaacccct

SEQ ID NO: 46841 - DNA, 22 bp, synthetic construct
  misc_feature 1..22: note = chemically synthesized
  source 1..22: mol_type = other DNA
ggtcatgggggaggaacccctg

SEQ ID NO: 46842 - DNA, 22 bp, synthetic construct
  misc_feature 1..22: note = chemically synthesized
  source 1..22: mol_type = other DNA
tgaaaggcttggtgccgtcctt

SEQ ID NO: 46843 - DNA, 22 bp, synthetic construct
  misc_feature 1..22: note = chemically synthesized
  source 1..22: mol_type = other DNA
ggtgccgtccttgtgataatga

SEQ ID NO: 46844 - DNA, 22 bp, synthetic construct
  misc_feature 1..22: note = chemically synthesized
  source 1..22: mol_type = other DNA
gtgccgtccttgtgataatgag

SEQ ID NO: 46845 - DNA, 22 bp, synthetic construct
  misc_feature 1..22: note = chemically synthesized
  source 1..22: mol_type = other DNA
gtgataatgagtaagttctccc

SEQ ID NO: 46846 - DNA, 22 bp, synthetic construct
  misc_feature 1..22: note = chemically synthesized
  source 1..22: mol_type = other DNA
tgataatgagtaagttctcccg

SEQ ID NO: 46847 - DNA, 22 bp, synthetic construct
  misc_feature 1..22: note = chemically synthesized
  source 1..22: mol_type = other DNA
tcccgctatgatttcccttgaa

SEQ ID NO: 46848 - DNA, 22 bp, synthetic construct
  misc_feature 1..22: note = chemically synthesized
  source 1..22: mol_type = other DNA
ccgctatgatttcccttgaagg

SEQ ID NO: 46849 - DNA, 22 bp, synthetic construct
  misc_feature 1..22: note = chemically synthesized
  source 1..22: mol_type = other DNA
tgatttcccttgaaggctgatt

SEQ ID NO: 46850 - DNA, 22 bp, synthetic construct
  misc_feature 1..22: note = chemically synthesized
  source 1..22: mol_type = other DNA
cccttgaaggctgattattaaa

SEQ ID NO: 46851 - DNA, 22 bp, synthetic construct
  misc_feature 1..22: note = chemically synthesized
  source 1..22: mol_type = other DNA
ccttgaaggctgattattaaaa

SEQ ID NO: 46852 - DNA, 22 bp, synthetic construct
  misc_feature 1..22: note = chemically synthesized
  source 1..22: mol_type = other DNA
gaaggctgattattaaaaagag

SEQ ID NO: 46853 - DNA, 22 bp, synthetic construct
  misc_feature 1..22: note = chemically synthesized
  source 1..22: mol_type = other DNA
aaggctgattattaaaaagagc

SEQ ID NO: 46854 - DNA, 22 bp, synthetic construct
  misc_feature 1..22: note = chemically synthesized
  source 1..22: mol_type = other DNA
attattaaaaagagcttggcac

SEQ ID NO: 46855 - DNA, 22 bp, synthetic construct
  misc_feature 1..22: note = chemically synthesized
  source 1..22: mol_type = other DNA
ttaaaaagagcttggcacctcc

SEQ ID NO: 46856 - DNA, 22 bp, synthetic construct
  misc_feature 1..22: note = chemically synthesized
  source 1..22: mol_type = other DNA
aaaagagcttggcacctccctc

SEQ ID NO: 46857 - DNA, 22 bp, synthetic construct
  misc_feature 1..22: note = chemically synthesized
  source 1..22: mol_type = other DNA
ggcacctccctctcttctctct

SEQ ID NO: 46858 - DNA, 22 bp, synthetic construct
  misc_feature 1..22: note = chemically synthesized
  source 1..22: mol_type = other DNA
gcacctccctctcttctctctt

SEQ ID NO: 46859 - DNA, 22 bp, synthetic construct
  misc_feature 1..22: note = chemically synthesized
  source 1..22: mol_type = other DNA
cctctcttctctcttgcttctt

SEQ ID NO: 46860 - DNA, 22 bp, synthetic construct
  misc_feature 1..22: note = chemically synthesized
  source 1..22: mol_type = other DNA
tcttctctcttgcttcttctct

SEQ ID NO: 46861 - DNA, 22 bp, synthetic construct
  misc_feature 1..22: note = chemically synthesized
  source 1..22: mol_type = other DNA
ttctctcttgcttcttctcttg

SEQ ID NO: 46862 - DNA, 22 bp, synthetic construct
  misc_feature 1..22: note = chemically synthesized
  source 1..22: mol_type = other DNA
ctctcttgcttcttctcttgcc

SEQ ID NO: 46863 - DNA, 22 bp, synthetic construct
  misc_feature 1..22: note = chemically synthesized
  source 1..22: mol_type = other DNA
tctcttgcttcttctcttgcca

SEQ ID NO: 46864 - DNA, 22 bp, synthetic construct
  misc_feature 1..22: note = chemically synthesized
  source 1..22: mol_type = other DNA
tcttgcttcttctcttgccatg

SEQ ID NO: 46865 - DNA, 22 bp, synthetic construct
  misc_feature 1..22: note = chemically synthesized
  source 1..22: mol_type = other DNA
ttgcttcttctcttgccatgtg

SEQ ID NO: 46866 - DNA, 22 bp, synthetic construct
  misc_feature 1..22: note = chemically synthesized
  source 1..22: mol_type = other DNA
gcttcttctcttgccatgtgat

SEQ ID NO: 46867 - DNA, 22 bp, synthetic construct
  misc_feature 1..22: note = chemically synthesized
  source 1..22: mol_type = other DNA
cttcttctcttgccatgtgatt

SEQ ID NO: 46868 - DNA, 22 bp, synthetic construct
  misc_feature 1..22: note = chemically synthesized
  source 1..22: mol_type = other DNA
cttctcttgccatgtgattgat

SEQ ID NO: 46869 - DNA, 22 bp, synthetic construct
  misc_feature 1..22: note = chemically synthesized
  source 1..22: mol_type = other DNA
ttctcttgccatgtgattgatc

SEQ ID NO: 46870 - DNA, 22 bp, synthetic construct
  misc_feature 1..22: note = chemically synthesized
  source 1..22: mol_type = other DNA
ctcttgccatgtgattgatctc

SEQ ID NO: 46871 - DNA, 22 bp, synthetic construct
  misc_feature 1..22: note = chemically synthesized
  source 1..22: mol_type = other DNA
tcttgccatgtgattgatctct

SEQ ID NO: 46872 - DNA, 22 bp, synthetic construct
  misc_feature 1..22: note = chemically synthesized
  source 1..22: mol_type = other DNA
ttgccatgtgattgatctctgc

SEQ ID NO: 46873 - DNA, 22 bp, synthetic construct
  misc_feature 1..22: note = chemically synthesized
  source 1..22: mol_type = other DNA
gccatgtgattgatctctgcac

SEQ ID NO: 46874 - DNA, 22 bp, synthetic construct
  misc_feature 1..22: note = chemically synthesized
  source 1..22: mol_type = other DNA
ccatgtgattgatctctgcaca

SEQ ID NO: 46875 - DNA, 22 bp, synthetic construct
  misc_feature 1..22: note = chemically synthesized
  source 1..22: mol_type = other DNA
atctctgcacatgtaggctccc

SEQ ID NO: 46876 - DNA, 22 bp, synthetic construct
  misc_feature 1..22: note = chemically synthesized
  source 1..22: mol_type = other DNA
tgcacatgtaggctccccttca

SEQ ID NO: 46877 - DNA, 22 bp, synthetic construct
  misc_feature 1..22: note = chemically synthesized
  source 1..22: mol_type = other DNA
cacatgtaggctccccttcacc

SEQ ID NO: 46878 - DNA, 22 bp, synthetic construct
  misc_feature 1..22: note = chemically synthesized
  source 1..22: mol_type = other DNA
cccttcaccttctgccatcagt

SEQ ID NO: 46879 - DNA, 22 bp, synthetic construct
  misc_feature 1..22: note = chemically synthesized
  source 1..22: mol_type = other DNA
caccttctgccatcagtgaaag

SEQ ID NO: 46880 - DNA, 22 bp, synthetic construct
  misc_feature 1..22: note = chemically synthesized
  source 1..22: mol_type = other DNA
accttctgccatcagtgaaagc

SEQ ID NO: 46881 - DNA, 22 bp, synthetic construct
  misc_feature 1..22: note = chemically synthesized
  source 1..22: mol_type = other DNA
ctgccatcagtgaaagcagctt

SEQ ID NO: 46882 - DNA, 22 bp, synthetic construct
  misc_feature 1..22: note = chemically synthesized
  source 1..22: mol_type = other DNA
tgccatcagtgaaagcagctta

SEQ ID NO: 46883 - DNA, 22 bp, synthetic construct
  misc_feature 1..22: note = chemically synthesized
  source 1..22: mol_type = other DNA
ccatcagtgaaagcagcttaag

SEQ ID NO: 46884 - DNA, 22 bp, synthetic construct
  misc_feature 1..22: note = chemically synthesized
  source 1..22: mol_type = other DNA
aaggccctcaccagaagcagat

SEQ ID NO: 46885 - DNA, 22 bp, synthetic construct
  misc_feature 1..22: note = chemically synthesized
  source 1..22: mol_type = other DNA
aggccctcaccagaagcagatg

SEQ ID NO: 46886 - DNA, 22 bp, synthetic construct
  misc_feature 1..22: note = chemically synthesized
  source 1..22: mol_type = other DNA
accagaagcagatgctggtgcc

SEQ ID NO: 46887 - DNA, 22 bp, synthetic construct
  misc_feature 1..22: note = chemically synthesized
  source 1..22: mol_type = other DNA
gtgccatgcttcctggagagct

SEQ ID NO: 46888 - DNA, 22 bp, synthetic construct
  misc_feature 1..22: note = chemically synthesized
  source 1..22: mol_type = other DNA
cctggagagcttgcagaatcat

SEQ ID NO: 46889 - DNA, 22 bp, synthetic construct
  misc_feature 1..22: note = chemically synthesized
  source 1..22: mol_type = other DNA
ctggagagcttgcagaatcatg

SEQ ID NO: 46890 - DNA, 22 bp, synthetic construct
  misc_feature 1..22: note = chemically synthesized
  source 1..22: mol_type = other DNA
gagagcttgcagaatcatgagc

SEQ ID NO: 46891 - DNA, 22 bp, synthetic construct
  misc_feature 1..22: note = chemically synthesized
  source 1..22: mol_type = other DNA
gcagaatcatgagctgaataaa

SEQ ID NO: 46892 - DNA, 22 bp, synthetic construct
  misc_feature 1..22: note = chemically synthesized
  source 1..22: mol_type = other DNA
cagaatcatgagctgaataaat

SEQ ID NO: 46893 - DNA, 22 bp, synthetic construct
  misc_feature 1..22: note = chemically synthesized
  source 1..22: mol_type = other DNA
aataaatcccttttccttgtaa

SEQ ID NO: 46894 - DNA, 22 bp, synthetic construct
  misc_feature 1..22: note = chemically synthesized
  source 1..22: mol_type = other DNA
ttccttgtaaattactcacctt

SEQ ID NO: 46895 - DNA, 22 bp, synthetic construct
  misc_feature 1..22: note = chemically synthesized
  source 1..22: mol_type = other DNA
tccttgtaaattactcaccttc

SEQ ID NO: 46896 - DNA, 22 bp, synthetic construct
  misc_feature 1..22: note = chemically synthesized
  source 1..22: mol_type = other DNA
ccttgtaaattactcaccttca

SEQ ID NO: 46897 - DNA, 22 bp, synthetic construct
  misc_feature 1..22: note = chemically synthesized
  source 1..22: mol_type = other DNA
cttgtaaattactcaccttcag

SEQ ID NO: 46898 - DNA, 22 bp, synthetic construct
  misc_feature 1..22: note = chemically synthesized
  source 1..22: mol_type = other DNA
gtaaattactcaccttcaggta

SEQ ID NO: 46899 - DNA, 22 bp, synthetic construct
  misc_feature 1..22: note = chemically synthesized
  source 1..22: mol_type = other DNA
taaattactcaccttcaggtat

SEQ ID NO: 46900 - DNA, 22 bp, synthetic construct
  misc_feature 1..22: note = chemically synthesized
  source 1..22: mol_type = other DNA
ctcaccttcaggtattccttta

SEQ ID NO: 46901 - DNA, 22 bp, synthetic construct
  misc_feature 1..22: note = chemically synthesized
  source 1..22: mol_type = other DNA
accttcaggtattcctttatat

SEQ ID NO: 46902 - DNA, 22 bp, synthetic construct
  misc_feature 1..22: note = chemically synthesized
  source 1..22: mol_type = other DNA
caggtattcctttatatagcaa

SEQ ID NO: 46903 - DNA, 22 bp, synthetic construct
  misc_feature 1..22: note = chemically synthesized
  source 1..22: mol_type = other DNA
aggtattcctttatatagcaac

SEQ ID NO: 46904 - DNA, 22 bp, synthetic construct
  misc_feature 1..22: note = chemically synthesized
  source 1..22: mol_type = other DNA
ctttatatagcaacacaaaagg

SEQ ID NO: 46905 - DNA, 22 bp, synthetic construct
  misc_feature 1..22: note = chemically synthesized
  source 1..22: mol_type = other DNA
tatatagcaacacaaaaggact

SEQ ID NO: 46906 - DNA, 22 bp, synthetic construct
  misc_feature 1..22: note = chemically synthesized
  source 1..22: mol_type = other DNA
atatagcaacacaaaaggacta

SEQ ID NO: 46907 - DNA, 22 bp, synthetic construct
  misc_feature 1..22: note = chemically synthesized
  source 1..22: mol_type = other DNA
tatagcaacacaaaaggactaa

SEQ ID NO: 46908 - DNA, 22 bp, synthetic construct
  misc_feature 1..22: note = chemically synthesized
  source 1..22: mol_type = other DNA
agacagtggccttgacttttct

SEQ ID NO: 46909 - DNA, 22 bp, synthetic construct
  misc_feature 1..22: note = chemically synthesized
  source 1..22: mol_type = other DNA
gacttttctctctctttaagaa

SEQ ID NO: 46910 - DNA, 22 bp, synthetic construct
  misc_feature 1..22: note = chemically synthesized
  source 1..22: mol_type = other DNA
acttttctctctctttaagaag

SEQ ID NO: 46911 - DNA, 22 bp, synthetic construct
  misc_feature 1..22: note = chemically synthesized
  source 1..22: mol_type = other DNA
ttctctctctttaagaagtgtt

SEQ ID NO: 46912 - DNA, 22 bp, synthetic construct
  misc_feature 1..22: note = chemically synthesized
  source 1..22: mol_type = other DNA
tctctctctttaagaagtgttg

SEQ ID NO: 46913 - DNA, 22 bp, synthetic construct
  misc_feature 1..22: note = chemically synthesized
  source 1..22: mol_type = other DNA
ctctctctttaagaagtgttgc

SEQ ID NO: 46914 - DNA, 22 bp, synthetic construct
  misc_feature 1..22: note = chemically synthesized
  source 1..22: mol_type = other DNA
tctctctttaagaagtgttgcc

SEQ ID NO: 46915 - DNA, 22 bp, synthetic construct
  misc_feature 1..22: note = chemically synthesized
  source 1..22: mol_type = other DNA
tctctttaagaagtgttgcctt

SEQ ID NO: 46916 - DNA, 22 bp, synthetic construct
  misc_feature 1..22: note = chemically synthesized
  source 1..22: mol_type = other DNA
tctttaagaagtgttgcctttg

SEQ ID NO: 46917 - DNA, 22 bp, synthetic construct
  misc_feature 1..22: note = chemically synthesized
  source 1..22: mol_type = other DNA
tttaagaagtgttgcctttgct

SEQ ID NO: 46918 - DNA, 22 bp, synthetic construct
  misc_feature 1..22: note = chemically synthesized
  source 1..22: mol_type = other DNA
taagaagtgttgcctttgctca

SEQ ID NO: 46919 - DNA, 22 bp, synthetic construct
  misc_feature 1..22: note = chemically synthesized
  source 1..22: mol_type = other DNA
aagaagtgttgcctttgctcac

SEQ ID NO: 46920 - DNA, 22 bp, synthetic construct
  misc_feature 1..22: note = chemically synthesized
  source 1..22: mol_type = other DNA
agaagtgttgcctttgctcact

SEQ ID NO: 46921 - DNA, 22 bp, synthetic construct
  misc_feature 1..22: note = chemically synthesized
  source 1..22: mol_type = other DNA
cctttgctcacttagtcatccc

SEQ ID NO: 46922 - DNA, 22 bp, synthetic construct
  misc_feature 1..22: note = chemically synthesized
  source 1..22: mol_type = other DNA
tgctcacttagtcatcccttct

SEQ ID NO: 46923 - DNA, 22 bp, synthetic construct
  misc_feature 1..22: note = chemically synthesized
  source 1..22: mol_type = other DNA
gctcacttagtcatcccttctg

SEQ ID NO: 46924 - DNA, 22 bp, synthetic construct
  misc_feature 1..22: note = chemically synthesized
  source 1..22: mol_type = other DNA
ctcacttagtcatcccttctgc

SEQ ID NO: 46925 - DNA, 22 bp, synthetic construct
  misc_feature 1..22: note = chemically synthesized
  source 1..22: mol_type = other DNA
acttagtcatcccttctgcctg

SEQ ID NO: 46926 - DNA, 22 bp, synthetic construct
  misc_feature 1..22: note = chemically synthesized
  source 1..22: mol_type = other DNA
agtcatcccttctgcctgcatt

SEQ ID NO: 46927 - DNA, 22 bp, synthetic construct
  misc_feature 1..22: note = chemically synthesized
  source 1..22: mol_type = other DNA
gtcatcccttctgcctgcattt

SEQ ID NO: 46928 - DNA, 22 bp, synthetic construct
  misc_feature 1..22: note = chemically synthesized
  source 1..22: mol_type = other DNA
ctgcctgcatttgtagagcatc

SEQ ID NO: 46929 - DNA, 22 bp, synthetic construct
  misc_feature 1..22: note = chemically synthesized
  source 1..22: mol_type = other DNA
tgcctgcatttgtagagcatct

SEQ ID NO: 46930 - DNA, 22 bp, synthetic construct
  misc_feature 1..22: note = chemically synthesized
  source 1..22: mol_type = other DNA
cctgcatttgtagagcatctgg

SEQ ID NO: 46931 - DNA, 22 bp, synthetic construct
  misc_feature 1..22: note = chemically synthesized
  source 1..22: mol_type = other DNA
catttgtagagcatctggatgg

SEQ ID NO: 46932 - DNA, 22 bp, synthetic construct
  misc_feature 1..22: note = chemically synthesized
  source 1..22: mol_type = other DNA
gtagagcatctggatgggagat

SEQ ID NO: 46933 - DNA, 22 bp, synthetic construct
  misc_feature 1..22: note = chemically synthesized
  source 1..22: mol_type = other DNA
tagagcatctggatgggagatt

SEQ ID NO: 46934 - DNA, 22 bp, synthetic construct
  misc_feature 1..22: note = chemically synthesized
  source 1..22: mol_type = other DNA
gatgggagatttatataaccgt

SEQ ID NO: 46935 - DNA, 22 bp, synthetic construct
  misc_feature 1..22: note = chemically synthesized
  source 1..22: mol_type = other DNA
atataaccgtcactcttgactt

SEQ ID NO: 46936 - DNA, 22 bp, synthetic construct
  misc_feature 1..22: note = chemically synthesized
  source 1..22: mol_type = other DNA
tataaccgtcactcttgacttt

SEQ ID NO: 46937 - DNA, 22 bp, synthetic construct
  misc_feature 1..22: note = chemically synthesized
  source 1..22: mol_type = other DNA
ttgactttcccagcaggcctat

SEQ ID NO: 46938 - DNA, 22 bp, synthetic construct
  misc_feature 1..22: note = chemically synthesized
  source 1..22: mol_type = other DNA
gactttcccagcaggcctatgt

SEQ ID NO: 46939 - DNA, 22 bp, synthetic construct
  misc_feature 1..22: note = chemically synthesized
  source 1..22: mol_type = other DNA
actttcccagcaggcctatgtc

SEQ ID NO: 46940 - DNA, 22 bp, synthetic construct
  misc_feature 1..22: note = chemically synthesized
  source 1..22: mol_type = other DNA
tcccagcaggcctatgtcatag

SEQ ID NO: 46941 - DNA, 22 bp, synthetic construct
  misc_feature 1..22: note = chemically synthesized
  source 1..22: mol_type = other DNA
cccagcaggcctatgtcatagg

SEQ ID NO: 46942 - DNA, 22 bp, synthetic construct
  misc_feature 1..22: note = chemically synthesized
  source 1..22: mol_type = other DNA
ccagcaggcctatgtcataggt

SEQ ID NO: 46943 - DNA, 22 bp, synthetic construct
  misc_feature 1..22: note = chemically synthesized
  source 1..22: mol_type = other DNA
tgtcataggtactgtggtctct

SEQ ID NO: 46944 - DNA, 22 bp, synthetic construct
  misc_feature 1..22: note = chemically synthesized
  source 1..22: mol_type = other DNA
tggtctctacaatacagcagag

SEQ ID NO: 46945 - DNA, 22 bp, synthetic construct
  misc_feature 1..22: note = chemically synthesized
  source 1..22: mol_type = other DNA
tacaatacagcagaggtatctg

SEQ ID NO: 46946 - DNA, 22 bp, synthetic construct
  misc_feature 1..22: note = chemically synthesized
  source 1..22: mol_type = other DNA
caatacagcagaggtatctgag

SEQ ID NO: 46947 - DNA, 22 bp, synthetic construct
  misc_feature 1..22: note = chemically synthesized
  source 1..22: mol_type = other DNA
aggctccgagaggttgagtgac

SEQ ID NO: 46948 - DNA, 22 bp, synthetic construct
  misc_feature 1..22: note = chemically synthesized
  source 1..22: mol_type = other DNA
cgagaggttgagtgacttgctc

SEQ ID NO: 46949 - DNA, 22 bp, synthetic construct
  misc_feature 1..22: note = chemically synthesized
  source 1..22: mol_type = other DNA
agtgacttgctcatggctgcac

SEQ ID NO: 46950 - DNA, 22 bp, synthetic construct
  misc_feature 1..22: note = chemically synthesized
  source 1..22: mol_type = other DNA
gctcatggctgcacaaccagta

SEQ ID NO: 46951 - DNA, 22 bp, synthetic construct
  misc_feature 1..22: note = chemically synthesized
  source 1..22: mol_type = other DNA
ctcatggctgcacaaccagtaa

SEQ ID NO: 46952 - DNA, 22 bp, synthetic construct
  misc_feature 1..22: note = chemically synthesized
  source 1..22: mol_type = other DNA
atggctgcacaaccagtaaata

SEQ ID NO: 46953 - DNA, 22 bp, synthetic construct
  misc_feature 1..22: note = chemically synthesized
  source 1..22: mol_type = other DNA
cacaaccagtaaatattggagc

SEQ ID NO: 46954 - DNA, 22 bp, synthetic construct
  misc_feature 1..22: note = chemically synthesized
  source 1..22: mol_type = other DNA
gagctggaattcaggtccacgg

SEQ ID NO: 46955 - DNA, 22 bp, synthetic construct
  misc_feature 1..22: note = chemically synthesized
  source 1..22: mol_type = other DNA
gaattcaggtccacggtttcct

SEQ ID NO: 46956 - DNA, 22 bp, synthetic construct
  misc_feature 1..22: note = chemically synthesized
  source 1..22: mol_type = other DNA
aggtccacggtttcctggctcc

SEQ ID NO: 46957 - DNA, 22 bp, synthetic construct
  misc_feature 1..22: note = chemically synthesized
  source 1..22: mol_type = other DNA
cctggctccaaagcccatgatt

SEQ ID NO: 46958 - DNA, 22 bp, synthetic construct
  misc_feature 1..22: note = chemically synthesized
  source 1..22: mol_type = other DNA
ctggctccaaagcccatgattt

SEQ ID NO: 46959 - DNA, 22 bp, synthetic construct
  misc_feature 1..22: note = chemically synthesized
  source 1..22: mol_type = other DNA
gctccaaagcccatgatttttt

SEQ ID NO: 46960 - DNA, 22 bp, synthetic construct
  misc_feature 1..22: note = chemically synthesized
  source 1..22: mol_type = other DNA
caaagcccatgattttttccct

SEQ ID NO: 46961 - DNA, 22 bp, synthetic construct
  misc_feature 1..22: note = chemically synthesized
  source 1..22: mol_type = other DNA
tttccctcaatttattctgact

SEQ ID NO: 46962 - DNA, 22 bp, synthetic construct
  misc_feature 1..22: note = chemically synthesized
  source 1..22: mol_type = other DNA
ttccctcaatttattctgactg

SEQ ID NO: 46963 - DNA, 22 bp, synthetic construct
  misc_feature 1..22: note = chemically synthesized
  source 1..22: mol_type = other DNA
tccctcaatttattctgactgg

SEQ ID NO: 46964 - DNA, 22 bp, synthetic construct
  misc_feature 1..22: note = chemically synthesized
  source 1..22: mol_type = other DNA
ccctcaatttattctgactggg

SEQ ID NO: 46965 - DNA, 22 bp, synthetic construct
  misc_feature 1..22: note = chemically synthesized
  source 1..22: mol_type = other DNA
cctcaatttattctgactgggg

SEQ ID NO: 46966 - DNA, 22 bp, synthetic construct
  misc_feature 1..22: note = chemically synthesized
  source 1..22: mol_type = other DNA
aatttattctgactggggcatg

SEQ ID NO: 46967 - DNA, 22 bp, synthetic construct
  misc_feature 1..22: note = chemically synthesized
  source 1..22: mol_type = other DNA
attctgactggggcatggggga

SEQ ID NO: 46968 - DNA, 22 bp, synthetic construct
  misc_feature 1..22: note = chemically synthesized
  source 1..22: mol_type = other DNA
ttctgactggggcatgggggag

SEQ ID NO: 46969 - DNA, 22 bp, synthetic construct
  misc_feature 1..22: note = chemically synthesized
  source 1..22: mol_type = other DNA
tgactggggcatgggggagggg

SEQ ID NO: 46970 - DNA, 22 bp, synthetic construct
  misc_feature 1..22: note = chemically synthesized
  source 1..22: mol_type = other DNA
actggggcatgggggagggggt

SEQ ID NO: 46971 - DNA, 22 bp, synthetic construct
  misc_feature 1..22: note = chemically synthesized
  source 1..22: mol_type = other DNA
gggcatgggggagggggtggcc

SEQ ID NO: 46972 - DNA, 22 bp, synthetic construct
  misc_feature 1..22: note = chemically synthesized
  source 1..22: mol_type = other DNA
tgggcagggccaccaggagcga

SEQ ID NO: 46973 - DNA, 22 bp, synthetic construct
  misc_feature 1..22: note = chemically synthesized
  source 1..22: mol_type = other DNA
gggcagggccaccaggagcgac

SEQ ID NO: 46974 - DNA, 22 bp, synthetic construct
  misc_feature 1..22: note = chemically synthesized
  source 1..22: mol_type = other DNA
ggcagggccaccaggagcgacc

SEQ ID NO: 46975 - DNA, 22 bp, synthetic construct
  misc_feature 1..22: note = chemically synthesized
  source 1..22: mol_type = other DNA
ggtgcaggtacagaggaaaacc

SEQ ID NO: 46976 - DNA, 22 bp, synthetic construct
  misc_feature 1..22: note = chemically synthesized
  source 1..22: mol_type = other DNA
ttgtcgagtgtggcccgtagtt

SEQ ID NO: 46977 - DNA, 22 bp, synthetic construct
  misc_feature 1..22: note = chemically synthesized
  source 1..22: mol_type = other DNA
tcgagtgtggcccgtagttccc

SEQ ID NO: 46978 - DNA, 22 bp, synthetic construct
  misc_feature 1..22: note = chemically synthesized
  source 1..22: mol_type = other DNA
ccatttttgcctgaatggcaca

SEQ ID NO: 46979 - DNA, 22 bp, synthetic construct
  misc_feature 1..22: note = chemically synthesized
  source 1..22: mol_type = other DNA
ttgcctgaatggcacatttgaa

SEQ ID NO: 46980 - DNA, 22 bp, synthetic construct
  misc_feature 1..22: note = chemically synthesized
  source 1..22: mol_type = other DNA
tgcctgaatggcacatttgaaa

SEQ ID NO: 46981 - DNA, 22 bp, synthetic construct
  misc_feature 1..22: note = chemically synthesized
  source 1..22: mol_type = other DNA
gcctgaatggcacatttgaaag

SEQ ID NO: 46982 - DNA, 22 bp, synthetic construct
  misc_feature 1..22: note = chemically synthesized
  source 1..22: mol_type = other DNA
cctgaatggcacatttgaaagt

SEQ ID NO: 46983 - DNA, 22 bp, synthetic construct
  misc_feature 1..22: note = chemically synthesized
  source 1..22: mol_type = other DNA
aatggcacatttgaaagtgtta

SEQ ID NO: 46984 - DNA, 22 bp, synthetic construct
  misc_feature 1..22: note = chemically synthesized
  source 1..22: mol_type = other DNA
gaaagtgttatataaccatgtg

SEQ ID NO: 46985 - DNA, 22 bp, synthetic construct
  misc_feature 1..22: note = chemically synthesized
  source 1..22: mol_type = other DNA
aaagtgttatataaccatgtga

SEQ ID NO: 46986 - DNA, 22 bp, synthetic construct
  misc_feature 1..22: note = chemically synthesized
  source 1..22: mol_type = other DNA
tataaccatgtgaataataata

SEQ ID NO: 46987 - DNA, 22 bp, synthetic construct
  misc_feature 1..22: note = chemically synthesized
  source 1..22: mol_type = other DNA
gcctatatgagttctttaattt

SEQ ID NO: 46988 - DNA, 22 bp, synthetic construct
  misc_feature 1..22: note = chemically synthesized
  source 1..22: mol_type = other DNA
tatgagttctttaatttgcttt

SEQ ID NO: 46989 - DNA, 22 bp, synthetic construct
  misc_feature 1..22: note = chemically synthesized
  source 1..22: mol_type = other DNA
tttaatttgctttttggtccgc

SEQ ID NO: 46990 - DNA, 22 bp, synthetic construct
  misc_feature 1..22: note = chemically synthesized
  source 1..22: mol_type = other DNA
taatttgctttttggtccgcat

SEQ ID NO: 46991 - DNA, 22 bp, synthetic construct
  misc_feature 1..22: note = chemically synthesized
  source 1..22: mol_type = other DNA
aatttgctttttggtccgcatt

SEQ ID NO: 46992 - DNA, 22 bp, synthetic construct
  misc_feature 1..22: note = chemically synthesized
  source 1..22: mol_type = other DNA
atttgctttttggtccgcattt

SEQ ID NO: 46993 - DNA, 22 bp, synthetic construct
  misc_feature 1..22: note = chemically synthesized
  source 1..22: mol_type = other DNA
gctttttggtccgcatttggta

SEQ ID NO: 46994 - DNA, 22 bp, synthetic construct
  misc_feature 1..22: note = chemically synthesized
  source 1..22: mol_type = other DNA
ctttttggtccgcatttggtaa

SEQ ID NO: 46995 - DNA, 22 bp, synthetic construct
  misc_feature 1..22: note = chemically synthesized
  source 1..22: mol_type = other DNA
tttggtccgcatttggtaactt

SEQ ID NO: 46996 - DNA, 22 bp, synthetic construct
  misc_feature 1..22: note = chemically synthesized
  source 1..22: mol_type = other DNA
ttggtccgcatttggtaacttc

SEQ ID NO: 46997 - DNA, 22 bp, synthetic construct
  misc_feature 1..22: note = chemically synthesized
  source 1..22: mol_type = other DNA
tggtccgcatttggtaacttct

SEQ ID NO: 46998 - DNA, 22 bp, synthetic construct
  misc_feature 1..22: note = chemically synthesized
  source 1..22: mol_type = other DNA
ggtccgcatttggtaacttctt

SEQ ID NO: 46999 - DNA, 22 bp, synthetic construct
  misc_feature 1..22: note = chemically synthesized
  source 1..22: mol_type = other DNA
gtccgcatttggtaacttcttt

SEQ ID NO: 47000 - DNA, 22 bp, synthetic construct
  misc_feature 1..22: note = chemically synthesized
  source 1..22: mol_type = other DNA
ggtaacttctttatcatctact

SEQ ID NO: 47001 - DNA, 22 bp, synthetic construct
  misc_feature 1..22: note = chemically synthesized
  source 1..22: mol_type = other DNA
gtaacttctttatcatctacta

SEQ ID NO: 47002 - DNA, 22 bp, synthetic construct
  misc_feature 1..22: note = chemically synthesized
  source 1..22: mol_type = other DNA
ctttatcatctactatactctg

SEQ ID NO: 47003 - DNA, 22 bp, synthetic construct
  misc_feature 1..22: note = chemically synthesized
  source 1..22: mol_type = other DNA
tttatcatctactatactctgt

SEQ ID NO: 47004 - DNA, 22 bp, synthetic construct
  misc_feature 1..22: note = chemically synthesized
  source 1..22: mol_type = other DNA
tatcatctactatactctgttg

SEQ ID NO: 47005 - DNA, 22 bp, synthetic construct
  misc_feature 1..22: note = chemically synthesized
  source 1..22: mol_type = other DNA
atcatctactatactctgttgt

SEQ ID NO: 47006 - DNA, 22 bp, synthetic construct
  misc_feature 1..22: note = chemically synthesized
  source 1..22: mol_type = other DNA
tcatctactatactctgttgtg

SEQ ID NO: 47007 - DNA, 22 bp, synthetic construct
  misc_feature 1..22: note = chemically synthesized
  source 1..22: mol_type = other DNA
ctatactctgttgtgtctcttt

SEQ ID NO: 47008 - DNA, 22 bp, synthetic construct
  misc_feature 1..22: note = chemically synthesized
  source 1..22: mol_type = other DNA
tactctgttgtgtctcttttgt

SEQ ID NO: 47009 - DNA, 22 bp, synthetic construct
  misc_feature 1..22: note = chemically synthesized
  source 1..22: mol_type = other DNA
tgttgtgtctcttttgttgtaa

SEQ ID NO: 47010 - DNA, 22 bp, synthetic construct
  misc_feature 1..22: note = chemically synthesized
  source 1..22: mol_type = other DNA
ttgtgtctcttttgttgtaatt

SEQ ID NO: 47011 - DNA, 22 bp, synthetic construct
  misc_feature 1..22: note = chemically synthesized
  source 1..22: mol_type = other DNA
tgtctcttttgttgtaatttgt

SEQ ID NO: 47012 - DNA, 22 bp, synthetic construct
  misc_feature 1..22: note = chemically synthesized
  source 1..22: mol_type = other DNA
ttttgttgtaatttgtaagtag

SEQ ID NO: 47013 - DNA, 22 bp, synthetic construct
  misc_feature 1..22: note = chemically synthesized
  source 1..22: mol_type = other DNA
ttgttgtaatttgtaagtaggg

SEQ ID NO: 47014 - DNA, 22 bp, synthetic construct
  misc_feature 1..22: note = chemically synthesized
  source 1..22: mol_type = other DNA
tgttgtaatttgtaagtagggg

SEQ ID NO: 47015 - DNA, 22 bp, synthetic construct
  misc_feature 1..22: note = chemically synthesized
  source 1..22: mol_type = other DNA
gttgtaatttgtaagtaggggt

SEQ ID NO: 47016 - DNA, 22 bp, synthetic construct
  misc_feature 1..22: note = chemically synthesized
  source 1..22: mol_type = other DNA
ttgtaatttgtaagtaggggtg

SEQ ID NO: 47017 - DNA, 22 bp, synthetic construct
  misc_feature 1..22: note = chemically synthesized
  source 1..22: mol_type = other DNA
taatttgtaagtaggggtgaga

SEQ ID NO: 47018 - DNA, 22 bp, synthetic construct
  misc_feature 1..22: note = chemically synthesized
  source 1..22: mol_type = other DNA
gtaagtaggggtgagataaagt

SEQ ID NO: 47019 - DNA, 22 bp, synthetic construct
  misc_feature 1..22: note = chemically synthesized
  source 1..22: mol_type = other DNA
taagtaggggtgagataaagta

SEQ ID NO: 47020 - DNA, 22 bp, synthetic construct
  misc_feature 1..22: note = chemically synthesized
  source 1..22: mol_type = other DNA
gggtttgctgggtttcttccat

SEQ ID NO: 47021 - DNA, 22 bp, synthetic construct
  misc_feature 1..22: note = chemically synthesized
  source 1..22: mol_type = other DNA
gctgggtttcttccatgtcatc

SEQ ID NO: 47022 - DNA, 22 bp, synthetic construct
  misc_feature 1..22: note = chemically synthesized
  source 1..22: mol_type = other DNA
ctgggtttcttccatgtcatca

SEQ ID NO: 47023 - DNA, 22 bp, synthetic construct
  misc_feature 1..22: note = chemically synthesized
  source 1..22: mol_type = other DNA
ggtttcttccatgtcatcatgt

SEQ ID NO: 47024 - DNA, 22 bp, synthetic construct
  misc_feature 1..22: note = chemically synthesized
  source 1..22: mol_type = other DNA
cttccatgtcatcatgttcctc

SEQ ID NO: 47025 - DNA, 22 bp, synthetic construct
  misc_feature 1..22: note = chemically synthesized
  source 1..22: mol_type = other DNA
ttccatgtcatcatgttcctcc

SEQ ID NO: 47026 - DNA, 22 bp, synthetic construct
  misc_feature 1..22: note = chemically synthesized
  source 1..22: mol_type = other DNA
ccatgtcatcatgttcctcctt

SEQ ID NO: 47027 - DNA, 22 bp, synthetic construct
  misc_feature 1..22: note = chemically synthesized
  source 1..22: mol_type = other DNA
catgtcatcatgttcctccttg

SEQ ID NO: 47028 - DNA, 22 bp, synthetic construct
  misc_feature 1..22: note = chemically synthesized
  source 1..22: mol_type = other DNA
ctccttgcatggggccaggatc

SEQ ID NO: 47029 - DNA, 22 bp, synthetic construct
  misc_feature 1..22: note = chemically synthesized
  source 1..22: mol_type = other DNA
cttgcatggggccaggatccgt

SEQ ID NO: 47030 - DNA, 22 bp, synthetic construct
  misc_feature 1..22: note = chemically synthesized
  source 1..22: mol_type = other DNA
gcatggggccaggatccgtgga

SEQ ID NO: 47031 - DNA, 22 bp, synthetic construct
  misc_feature 1..22: note = chemically synthesized
  source 1..22: mol_type = other DNA
catggggccaggatccgtggag

SEQ ID NO: 47032 - DNA, 22 bp, synthetic construct
  misc_feature 1..22: note = chemically synthesized
  source 1..22: mol_type = other DNA
cctggcacctacgtggtggtgc

SEQ ID NO: 47033 - DNA, 22 bp, synthetic construct
  misc_feature 1..22: note = chemically synthesized
  source 1..22: mol_type = other DNA
gcacctacgtggtggtgctgaa

SEQ ID NO: 47034 - DNA, 22 bp, synthetic construct
  misc_feature 1..22: note = chemically synthesized
  source 1..22: mol_type = other DNA
cgtggtggtgctgaaggaggag

SEQ ID NO: 47035 - DNA, 22 bp, synthetic construct
  misc_feature 1..22: note = chemically synthesized
  source 1..22: mol_type = other DNA
aaggaggagacccacctctcgc

SEQ ID NO: 47036 - DNA, 22 bp, synthetic construct
  misc_feature 1..22: note = chemically synthesized
  source 1..22: mol_type = other DNA
tcgcagtcagagcgcactgccc

SEQ ID NO: 47037 - DNA, 22 bp, synthetic construct
  misc_feature 1..22: note = chemically synthesized
  source 1..22: mol_type = other DNA
gcagtcagagcgcactgcccgc

SEQ ID NO: 47038 - DNA, 22 bp, synthetic construct
  misc_feature 1..22: note = chemically synthesized
  source 1..22: mol_type = other DNA
cccgccgcctgcaggcccaggc

SEQ ID NO: 47039 - DNA, 22 bp, synthetic construct
  misc_feature 1..22: note = chemically synthesized
  source 1..22: mol_type = other DNA
caggcccaggctgcccgccggg

SEQ ID NO: 47040 - DNA, 22 bp, synthetic construct
  misc_feature 1..22: note = chemically synthesized
  source 1..22: mol_type = other DNA
cccgccggggatacctcaccaa

SEQ ID NO: 47041 - DNA, 22 bp, synthetic construct
  misc_feature 1..22: note = chemically synthesized
  source 1..22: mol_type = other DNA
accaagatcctgcatgtcttcc

SEQ ID NO: 47042 - DNA, 22 bp, synthetic construct
  misc_feature 1..22: note = chemically synthesized
  source 1..22: mol_type = other DNA
catgtcttccatggccttcttc

SEQ ID NO: 47043 - DNA, 22 bp, synthetic construct
  misc_feature 1..22: note = chemically synthesized
  source 1..22: mol_type = other DNA
ccatggccttcttcctggcttc

SEQ ID NO: 47044 - DNA, 22 bp, synthetic construct
  misc_feature 1..22: note = chemically synthesized
  source 1..22: mol_type = other DNA
catggccttcttcctggcttcc

SEQ ID NO: 47045 - DNA, 22 bp, synthetic construct
  misc_feature 1..22: note = chemically synthesized
  source 1..22: mol_type = other DNA
cttcctggcttcctggtgaaga

SEQ ID NO: 47046 - DNA, 22 bp, synthetic construct
  misc_feature 1..22: note = chemically synthesized
  source 1..22: mol_type = other DNA
ttcctggcttcctggtgaagat

SEQ ID NO: 47047 - DNA, 22 bp, synthetic construct
  misc_feature 1..22: note = chemically synthesized
  source 1..22: mol_type = other DNA
cctggcttcctggtgaagatga

SEQ ID NO: 47048 - DNA, 22 bp, synthetic construct
  misc_feature 1..22: note = chemically synthesized
  source 1..22: mol_type = other DNA
ctggcttcctggtgaagatgag

SEQ ID NO: 47049 - DNA, 22 bp, synthetic construct
  misc_feature 1..22: note = chemically synthesized
  source 1..22: mol_type = other DNA
gcttcctggtgaagatgagtgg

SEQ ID NO: 47050 - DNA, 22 bp, synthetic construct
  misc_feature 1..22: note = chemically synthesized
  source 1..22: mol_type = other DNA
cctggtgaagatgagtggcgac

SEQ ID NO: 47051 - DNA, 22 bp, synthetic construct
  misc_feature 1..22: note = chemically synthesized
  source 1..22: mol_type = other DNA
ctggtgaagatgagtggcgacc

SEQ ID NO: 47052 - DNA, 22 bp, synthetic construct
  misc_feature 1..22: note = chemically synthesized
  source 1..22: mol_type = other DNA
gtgaagatgagtggcgacctgc

SEQ ID NO: 47053 - DNA, 22 bp, synthetic construct
  misc_feature 1..22: note = chemically synthesized
  source 1..22: mol_type = other DNA
ctggagctggtgagccaccctt

SEQ ID NO: 47054 - DNA, 22 bp, synthetic construct
  misc_feature 1..22: note = chemically synthesized
  source 1..22: mol_type = other DNA
gagctggtgagccacccttttt

SEQ ID NO: 47055 - DNA, 22 bp, synthetic construct
  misc_feature 1..22: note = chemically synthesized
  source 1..22: mol_type = other DNA
gtgagccaccctttttgggaat

SEQ ID NO: 47056 - DNA, 22 bp, synthetic construct
  misc_feature 1..22: note = chemically synthesized
  source 1..22: mol_type = other DNA
tttgggaatggcacttcctgat

SEQ ID NO: 47057 - DNA, 22 bp, synthetic construct
  misc_feature 1..22: note = chemically synthesized
  source 1..22: mol_type = other DNA
ttgggaatggcacttcctgata

SEQ ID NO: 47058 - DNA, 22 bp, synthetic construct
  misc_feature 1..22: note = chemically synthesized
  source 1..22: mol_type = other DNA
tgggaatggcacttcctgatag

SEQ ID NO: 47059 - DNA, 22 bp, synthetic construct
  misc_feature 1..22: note = chemically synthesized
  source 1..22: mol_type = other DNA
gggaatggcacttcctgatagg

SEQ ID NO: 47060 - DNA, 22 bp, synthetic construct
  misc_feature 1..22: note = chemically synthesized
  source 1..22: mol_type = other DNA
ggaatggcacttcctgataggg

SEQ ID NO: 47061 - DNA, 22 bp, synthetic construct
  misc_feature 1..22: note = chemically synthesized
  source 1..22: mol_type = other DNA
cctgatagggctgggccactgc

SEQ ID NO: 47062 - DNA, 22 bp, synthetic construct
  misc_feature 1..22: note = chemically synthesized
  source 1..22: mol_type = other DNA
ctgatagggctgggccactgca

SEQ ID NO: 47063 - DNA, 22 bp, synthetic construct
  misc_feature 1..22: note = chemically synthesized
  source 1..22: mol_type = other DNA
atagggctgggccactgcatat

SEQ ID NO: 47064 - DNA, 22 bp, synthetic construct
  misc_feature 1..22: note = chemically synthesized
  source 1..22: mol_type = other DNA
ggccactgcatatacactgggg

SEQ ID NO: 47065 - DNA, 22 bp, synthetic construct
  misc_feature 1..22: note = chemically synthesized
  source 1..22: mol_type = other DNA
catatacactggggactgtgct

SEQ ID NO: 47066 - DNA, 22 bp, synthetic construct
  misc_feature 1..22: note = chemically synthesized
  source 1..22: mol_type = other DNA
gggactgtgcttagtaggccca

SEQ ID NO: 47067 - DNA, 22 bp, synthetic construct
  misc_feature 1..22: note = chemically synthesized
  source 1..22: mol_type = other DNA
tgcttagtaggcccattgctga

SEQ ID NO: 47068 - DNA, 22 bp, synthetic construct
  misc_feature 1..22: note = chemically synthesized
  source 1..22: mol_type = other DNA
agtaggcccattgctgaaaatc

SEQ ID NO: 47069 - DNA, 22 bp, synthetic construct
  misc_feature 1..22: note = chemically synthesized
  source 1..22: mol_type = other DNA
gtaggcccattgctgaaaatca

SEQ ID NO: 47070 - DNA, 22 bp, synthetic construct
  misc_feature 1..22: note = chemically synthesized
  source 1..22: mol_type = other DNA
ctgaaaatcagaaggggacagc

SEQ ID NO: 47071 - DNA, 22 bp, synthetic construct
  misc_feature 1..22: note = chemically synthesized
  source 1..22: mol_type = other DNA
aaaatcagaaggggacagcaag

SEQ ID NO: 47072 - DNA, 22 bp, synthetic construct
  misc_feature 1..22: note = chemically synthesized
  source 1..22: mol_type = other DNA
agcacttatcgggtaccaagca

SEQ ID NO: 47073 - DNA, 22 bp, synthetic construct
  misc_feature 1..22: note = chemically synthesized
  source 1..22: mol_type = other DNA
atcgggtaccaagcacagtaac

SEQ ID NO: 47074 - DNA, 22 bp, synthetic construct
  misc_feature 1..22: note = chemically synthesized
  source 1..22: mol_type = other DNA
tcgggtaccaagcacagtaact

SEQ ID NO: 47075 - DNA, 22 bp, synthetic construct
  misc_feature 1..22: note = chemically synthesized
  source 1..22: mol_type = other DNA
ctggctttctgtatagaattcc

SEQ ID NO: 47076 - DNA, 22 bp, synthetic construct
  misc_feature 1..22: note = chemically synthesized
  source 1..22: mol_type = other DNA
gctttctgtatagaattccctt

SEQ ID NO: 47077 - DNA, 22 bp, synthetic construct
  misc_feature 1..22: note = chemically synthesized
  source 1..22: mol_type = other DNA
tctgtatagaattccctttaag

SEQ ID NO: 47078 - DNA, 22 bp, synthetic construct
  misc_feature 1..22: note = chemically synthesized
  source 1..22: mol_type = other DNA
ctgtatagaattccctttaagc

SEQ ID NO: 47079 - DNA, 22 bp, synthetic construct
  misc_feature 1..22: note = chemically synthesized
  source 1..22: mol_type = other DNA
tgtatagaattccctttaagcc

SEQ ID NO: 47080 - DNA, 22 bp, synthetic construct
  misc_feature 1..22: note = chemically synthesized
  source 1..22: mol_type = other DNA
tatagaattccctttaagcctg

SEQ ID NO: 47081 - DNA, 22 bp, synthetic construct
  misc_feature 1..22: note = chemically synthesized
  source 1..22: mol_type = other DNA
cctttaagcctggccatgcccc

SEQ ID NO: 47082 - DNA, 22 bp, synthetic construct
  misc_feature 1..22: note = chemically synthesized
  source 1..22: mol_type = other DNA
taagcctggccatgccccagtg

SEQ ID NO: 47083 - DNA, 22 bp, synthetic construct
  misc_feature 1..22: note = chemically synthesized
  source 1..22: mol_type = other DNA
aagcctggccatgccccagtgg

SEQ ID NO: 47084 - DNA, 22 bp, synthetic construct
  misc_feature 1..22: note = chemically synthesized
  source 1..22: mol_type = other DNA
agcctggccatgccccagtggt

SEQ ID NO: 47085 - DNA, 22 bp, synthetic construct
  misc_feature 1..22: note = chemically synthesized
  source 1..22: mol_type = other DNA
gccatgccccagtggtacgtct

SEQ ID NO: 47086 - DNA, 22 bp, synthetic construct
  misc_feature 1..22: note = chemically synthesized
  source 1..22: mol_type = other DNA
tcttcatttgaaagacgaggag

SEQ ID NO: 47087 - DNA, 22 bp, synthetic construct
  misc_feature 1..22: note = chemically synthesized
  source 1..22: mol_type = other DNA
catttgaaagacgaggagactg

SEQ ID NO: 47088 - DNA, 22 bp, synthetic construct
  misc_feature 1..22: note = chemically synthesized
  source 1..22: mol_type = other DNA
atttgaaagacgaggagactga

SEQ ID NO: 47089 - DNA, 22 bp, synthetic construct
  misc_feature 1..22: note = chemically synthesized
  source 1..22: mol_type = other DNA
gaaagacgaggagactgaagtt

SEQ ID NO: 47090 - DNA, 22 bp, synthetic construct
  misc_feature 1..22: note = chemically synthesized
  source 1..22: mol_type = other DNA
aaagacgaggagactgaagttc

SEQ ID NO: 47091 - DNA, 22 bp, synthetic construct
  misc_feature 1..22: note = chemically synthesized
  source 1..22: mol_type = other DNA
aagttcagaggggaccacacag

SEQ ID NO: 47092 - DNA, 22 bp, synthetic construct
  misc_feature 1..22: note = chemically synthesized
  source 1..22: mol_type = other DNA
agaggggaccacacagacagct

SEQ ID NO: 47093 - DNA, 22 bp, synthetic construct
  misc_feature 1..22: note = chemically synthesized
  source 1..22: mol_type = other DNA
ggggtagagcctggatcaaacc

SEQ ID NO: 47094 - DNA, 22 bp, synthetic construct
  misc_feature 1..22: note = chemically synthesized
  source 1..22: mol_type = other DNA
gatcaaacccattggtctgcct

SEQ ID NO: 47095 - DNA, 22 bp, synthetic construct
  misc_feature 1..22: note = chemically synthesized
  source 1..22: mol_type = other DNA
gtctgcctgccagccattcttg

SEQ ID NO: 47096 - DNA, 22 bp, synthetic construct
  misc_feature 1..22: note = chemically synthesized
  source 1..22: mol_type = other DNA
cctgccagccattcttgtgcca

SEQ ID NO: 47097 - DNA, 22 bp, synthetic construct
  misc_feature 1..22: note = chemically synthesized
  source 1..22: mol_type = other DNA
ccagccattcttgtgccaatgc

SEQ ID NO: 47098 - DNA, 22 bp, synthetic construct
  misc_feature 1..22: note = chemically synthesized
  source 1..22: mol_type = other DNA
ttgtgccaatgcatctgctgcc

SEQ ID NO: 47099 - DNA, 22 bp, synthetic construct
  misc_feature 1..22: note = chemically synthesized
  source 1..22: mol_type = other DNA
gtgccaatgcatctgctgccta

SEQ ID NO: 47100 - DNA, 22 bp, synthetic construct
  misc_feature 1..22: note = chemically synthesized
  source 1..22: mol_type = other DNA
tgccaatgcatctgctgcctac

SEQ ID NO: 47101 - DNA, 22 bp, synthetic construct
  misc_feature 1..22: note = chemically synthesized
  source 1..22: mol_type = other DNA
ctgcctacggaaacctgtaggg

SEQ ID NO: 47102 - DNA, 22 bp, synthetic construct
  misc_feature 1..22: note = chemically synthesized
  source 1..22: mol_type = other DNA
cctacggaaacctgtagggaca

SEQ ID NO: 47103 - DNA, 22 bp, synthetic construct
  misc_feature 1..22: note = chemically synthesized
  source 1..22: mol_type = other DNA
cggaaacctgtagggacaaggc

SEQ ID NO: 47104 - DNA, 22 bp, synthetic construct
  misc_feature 1..22: note = chemically synthesized
  source 1..22: mol_type = other DNA
tagggacaaggccctgggatgt

SEQ ID NO: 47105 - DNA, 22 bp, synthetic construct
  misc_feature 1..22: note = chemically synthesized
  source 1..22: mol_type = other DNA
ggatgttcagtggagcctgagt

SEQ ID NO: 47106 - DNA, 22 bp, synthetic construct
  misc_feature 1..22: note = chemically synthesized
  source 1..22: mol_type = other DNA
agtggagcctgagtcattttat

SEQ ID NO: 47107 - DNA, 22 bp, synthetic construct
  misc_feature 1..22: note = chemically synthesized
  source 1..22: mol_type = other DNA
agtcattttataaaaaagcatg

SEQ ID NO: 47108 - DNA, 22 bp, synthetic construct
  misc_feature 1..22: note = chemically synthesized
  source 1..22: mol_type = other DNA
tataaaaaagcatgactctagg

SEQ ID NO: 47109 - DNA, 22 bp, synthetic construct
  misc_feature 1..22: note = chemically synthesized
  source 1..22: mol_type = other DNA
ataaaaaagcatgactctaggg

SEQ ID NO: 47110 - DNA, 22 bp, synthetic construct
  misc_feature 1..22: note = chemically synthesized
  source 1..22: mol_type = other DNA
taaaaaagcatgactctagggt

SEQ ID NO: 47111 - DNA, 22 bp, synthetic construct
  misc_feature 1..22: note = chemically synthesized
  source 1..22: mol_type = other DNA
tagggtccaaaattcctttgaa

SEQ ID NO: 47112 - DNA, 22 bp, synthetic construct
  misc_feature 1..22: note = chemically synthesized
  source 1..22: mol_type = other DNA
gggtccaaaattcctttgaagc

SEQ ID NO: 47113 - DNA, 22 bp, synthetic construct
  misc_feature 1..22: note = chemically synthesized
  source 1..22: mol_type = other DNA
ctttgaagctgttgctatccag

SEQ ID NO: 47114 - DNA, 22 bp, synthetic construct
  misc_feature 1..22: note = chemically synthesized
  source 1..22: mol_type = other DNA
tgaagctgttgctatccagagt

SEQ ID NO: 47115 - DNA, 22 bp, synthetic construct
  misc_feature 1..22: note = chemically synthesized
  source 1..22: mol_type = other DNA
gaagctgttgctatccagagtg

SEQ ID NO: 47116 - DNA, 22 bp, synthetic construct
  misc_feature 1..22: note = chemically synthesized
  source 1..22: mol_type = other DNA
aagctgttgctatccagagtga

SEQ ID NO: 47117 - DNA, 22 bp, synthetic construct
  misc_feature 1..22: note = chemically synthesized
  source 1..22: mol_type = other DNA
ttgctatccagagtgaagtccc

SEQ ID NO: 47118 - DNA, 22 bp, synthetic construct
  misc_feature 1..22: note = chemically synthesized
  source 1..22: mol_type = other DNA
ctatccagagtgaagtcccttc

SEQ ID NO: 47119 - DNA, 22 bp, synthetic construct
  misc_feature 1..22: note = chemically synthesized
  source 1..22: mol_type = other DNA
tccagagtgaagtcccttcttt

SEQ ID NO: 47120 - DNA, 22 bp, synthetic construct
  misc_feature 1..22: note = chemically synthesized
  source 1..22: mol_type = other DNA
ctttaggacagggtggccctcc

SEQ ID NO: 47121 - DNA, 22 bp, synthetic construct
  misc_feature 1..22: note = chemically synthesized
  source 1..22: mol_type = other DNA
tttaggacagggtggccctcct

SEQ ID NO: 47122 - DNA, 22 bp, synthetic construct
  misc_feature 1..22: note = chemically synthesized
  source 1..22: mol_type = other DNA
taggacagggtggccctcctcc

SEQ ID NO: 47123 - DNA, 22 bp, synthetic construct
  misc_feature 1..22: note = chemically synthesized
  source 1..22: mol_type = other DNA
aggacagggtggccctcctccc

SEQ ID NO: 47124 - DNA, 22 bp, synthetic construct
  misc_feature 1..22: note = chemically synthesized
  source 1..22: mol_type = other DNA
ggacagggtggccctcctccct

SEQ ID NO: 47125 - DNA, 22 bp, synthetic construct
  misc_feature 1..22: note = chemically synthesized
  source 1..22: mol_type = other DNA
ctccctcctggatgtcacatct

SEQ ID NO: 47126 - DNA, 22 bp, synthetic construct
  misc_feature 1..22: note = chemically synthesized
  source 1..22: mol_type = other DNA
cctcctggatgtcacatcttcg

SEQ ID NO: 47127 - DNA, 22 bp, synthetic construct
  misc_feature 1..22: note = chemically synthesized
  source 1..22: mol_type = other DNA
ctggatgtcacatcttcggtgg

SEQ ID NO: 47128 - DNA, 22 bp, synthetic construct
  misc_feature 1..22: note = chemically synthesized
  source 1..22: mol_type = other DNA
gatgtcacatcttcggtggagg

SEQ ID NO: 47129 - DNA, 22 bp, synthetic construct
  misc_feature 1..22: note = chemically synthesized
  source 1..22: mol_type = other DNA
cggtggaggggcagaaagggga

SEQ ID NO: 47130 - DNA, 22 bp, synthetic construct
  misc_feature 1..22: note = chemically synthesized
  source 1..22: mol_type = other DNA
ggtggaggggcagaaaggggac

SEQ ID NO: 47131 - DNA, 22 bp, synthetic construct
  misc_feature 1..22: note = chemically synthesized
  source 1..22: mol_type = other DNA
ggtattctcctcaccctggccc

SEQ ID NO: 47132 - DNA, 22 bp, synthetic construct
  misc_feature 1..22: note = chemically synthesized
  source 1..22: mol_type = other DNA
tcctcaccctggccctagtgct

SEQ ID NO: 47133 - DNA, 22 bp, synthetic construct
  misc_feature 1..22: note = chemically synthesized
  source 1..22: mol_type = other DNA
ctcaccctggccctagtgcttc

SEQ ID NO: 47134 - DNA, 22 bp, synthetic construct
  misc_feature 1..22: note = chemically synthesized
  source 1..22: mol_type = other DNA
accctggccctagtgcttcaaa

SEQ ID NO: 47135 - DNA, 22 bp, synthetic construct
  misc_feature 1..22: note = chemically synthesized
  source 1..22: mol_type = other DNA
gccctagtgcttcaaatcttaa

SEQ ID NO: 47136 - DNA, 22 bp, synthetic construct
  misc_feature 1..22: note = chemically synthesized
  source 1..22: mol_type = other DNA
gtgcttcaaatcttaaaaaaac

SEQ ID NO: 47137 - DNA, 22 bp, synthetic construct
  misc_feature 1..22: note = chemically synthesized
  source 1..22: mol_type = other DNA
caaatcttaaaaaaacgttttt

SEQ ID NO: 47138 - DNA, 22 bp, synthetic construct
  misc_feature 1..22: note = chemically synthesized
  source 1..22: mol_type = other DNA
aaatcttaaaaaaacgttttta

SEQ ID NO: 47139 - DNA, 22 bp, synthetic construct
  misc_feature 1..22: note = chemically synthesized
  source 1..22: mol_type = other DNA
aaaaaaacgtttttatttgtgc

SEQ ID NO: 47140 - DNA, 22 bp, synthetic construct
  misc_feature 1..22: note = chemically synthesized
  source 1..22: mol_type = other DNA
aaaaaacgtttttatttgtgct

SEQ ID NO: 47141 - DNA, 22 bp, synthetic construct
  misc_feature 1..22: note = chemically synthesized
  source 1..22: mol_type = other DNA
ttatttgtgcttctgcaccacc

SEQ ID NO: 47142 - DNA, 22 bp, synthetic construct
  misc_feature 1..22: note = chemically synthesized
  source 1..22: mol_type = other DNA
tatttgtgcttctgcaccacct

SEQ ID NO: 47143 - DNA, 22 bp, synthetic construct
  misc_feature 1..22: note = chemically synthesized
  source 1..22: mol_type = other DNA
atttgtgcttctgcaccacctt

SEQ ID NO: 47144 - DNA, 22 bp, synthetic construct
  misc_feature 1..22: note = chemically synthesized
  source 1..22: mol_type = other DNA
tttgtgcttctgcaccaccttc

SEQ ID NO: 47145 - DNA, 22 bp, synthetic construct
  misc_feature 1..22: note = chemically synthesized
  source 1..22: mol_type = other DNA
gtgcttctgcaccaccttctag

SEQ ID NO: 47146 - DNA, 22 bp, synthetic construct
  misc_feature 1..22: note = chemically synthesized
  source 1..22: mol_type = other DNA
tgcttctgcaccaccttctagc

SEQ ID NO: 47147 - DNA, 22 bp, synthetic construct
  misc_feature 1..22: note = chemically synthesized
  source 1..22: mol_type = other DNA
gaaggtggtgcagaagcacaaa

SEQ ID NO: 47148 - DNA, 22 bp, synthetic construct
  misc_feature 1..22: note = chemically synthesized
  source 1..22: mol_type = other DNA
ttttaagatttgaagcactagg

SEQ ID NO: 47149 - DNA, 22 bp, synthetic construct
  misc_feature 1..22: note = chemically synthesized
  source 1..22: mol_type = other DNA
tttaagatttgaagcactaggg

SEQ ID NO: 47150 - DNA, 22 bp, synthetic construct
  misc_feature 1..22: note = chemically synthesized
  source 1..22: mol_type = other DNA
ttaagatttgaagcactagggc

SEQ ID NO: 47151 - DNA, 22 bp, synthetic construct
  misc_feature 1..22: note = chemically synthesized
  source 1..22: mol_type = other DNA
taagatttgaagcactagggcc

SEQ ID NO: 47152 - DNA, 22 bp, synthetic construct
  misc_feature 1..22: note = chemically synthesized
  source 1..22: mol_type = other DNA
aagatttgaagcactagggcca

SEQ ID NO: 47153 - DNA, 22 bp, synthetic construct
  misc_feature 1..22: note = chemically synthesized
  source 1..22: mol_type = other DNA
agatttgaagcactagggccag

SEQ ID NO: 47154 - DNA, 22 bp, synthetic construct
  misc_feature 1..22: note = chemically synthesized
  source 1..22: mol_type = other DNA
gaagcactagggccagggtgag

SEQ ID NO: 47155 - DNA, 22 bp, synthetic construct
  misc_feature 1..22: note = chemically synthesized
  source 1..22: mol_type = other DNA
aagcactagggccagggtgagg

SEQ ID NO: 47156 - DNA, 22 bp, synthetic construct
  misc_feature 1..22: note = chemically synthesized
  source 1..22: mol_type = other DNA
gggccagggtgaggagaatacc

SEQ ID NO: 47157 - DNA, 22 bp, synthetic construct
  misc_feature 1..22: note = chemically synthesized
  source 1..22: mol_type = other DNA
tctgcccctccaccgaagatgt

SEQ ID NO: 47158 - DNA, 22 bp, synthetic construct
  misc_feature 1..22: note = chemically synthesized
  source 1..22: mol_type = other DNA
ctgcccctccaccgaagatgtg

SEQ ID NO: 47159 - DNA, 22 bp, synthetic construct
  misc_feature 1..22: note = chemically synthesized
  source 1..22: mol_type = other DNA
tgcccctccaccgaagatgtga

SEQ ID NO: 47160 - DNA, 22 bp, synthetic construct
  misc_feature 1..22: note = chemically synthesized
  source 1..22: mol_type = other DNA
cccctccaccgaagatgtgaca

SEQ ID NO: 47161 - DNA, 22 bp, synthetic construct
  misc_feature 1..22: note = chemically synthesized
  source 1..22: mol_type = other DNA
caccgaagatgtgacatccagg

SEQ ID NO: 47162 - DNA, 22 bp, synthetic construct
  misc_feature 1..22: note = chemically synthesized
  source 1..22: mol_type = other DNA
tcctaaagaagggacttcactc

SEQ ID NO: 47163 - DNA, 22 bp, synthetic construct
  misc_feature 1..22: note = chemically synthesized
  source 1..22: mol_type = other DNA
aagaagggacttcactctggat

SEQ ID NO: 47164 - DNA, 22 bp, synthetic construct
  misc_feature 1..22: note = chemically synthesized
  source 1..22: mol_type = other DNA
cactctggatagcaacagcttc

SEQ ID NO: 47165 - DNA, 22 bp, synthetic construct
  misc_feature 1..22: note = chemically synthesized
  source 1..22: mol_type = other DNA
actctggatagcaacagcttca

SEQ ID NO: 47166 - DNA, 22 bp, synthetic construct
  misc_feature 1..22: note = chemically synthesized
  source 1..22: mol_type = other DNA
tggatagcaacagcttcaaagg

SEQ ID NO: 47167 - DNA, 22 bp, synthetic construct
  misc_feature 1..22: note = chemically synthesized
  source 1..22: mol_type = other DNA
gatagcaacagcttcaaaggaa

SEQ ID NO: 47168 - DNA, 22 bp, synthetic construct
  misc_feature 1..22: note = chemically synthesized
  source 1..22: mol_type = other DNA
caaaggaattttggaccctaga

SEQ ID NO: 47169 - DNA, 22 bp, synthetic construct
  misc_feature 1..22: note = chemically synthesized
  source 1..22: mol_type = other DNA
aaaggaattttggaccctagag

SEQ ID NO: 47170 - DNA, 22 bp, synthetic construct
  misc_feature 1..22: note = chemically synthesized
  source 1..22: mol_type = other DNA
tggaccctagagtcatgctttt

SEQ ID NO: 47171 - DNA, 22 bp, synthetic construct
  misc_feature 1..22: note = chemically synthesized
  source 1..22: mol_type = other DNA
ggaccctagagtcatgcttttt

SEQ ID NO: 47172 - DNA, 22 bp, synthetic construct
  misc_feature 1..22: note = chemically synthesized
  source 1..22: mol_type = other DNA
gaccctagagtcatgctttttt

SEQ ID NO: 47173 - DNA, 22 bp, synthetic construct
  misc_feature 1..22: note = chemically synthesized
  source 1..22: mol_type = other DNA
gagtcatgcttttttataaaat

SEQ ID NO: 47174 - DNA, 22 bp, synthetic construct
  misc_feature 1..22: note = chemically synthesized
  source 1..22: mol_type = other DNA
ttttataaaatgactcaggctc

SEQ ID NO: 47175 - DNA, 22 bp, synthetic construct
  misc_feature 1..22: note = chemically synthesized
  source 1..22: mol_type = other DNA
tttataaaatgactcaggctcc

SEQ ID NO: 47176 - DNA, 22 bp, synthetic construct
  misc_feature 1..22: note = chemically synthesized
  source 1..22: mol_type = other DNA
ttataaaatgactcaggctcca

SEQ ID NO: 47177 - DNA, 22 bp, synthetic construct
  misc_feature 1..22: note = chemically synthesized
  source 1..22: mol_type = other DNA
tataaaatgactcaggctccac

SEQ ID NO: 47178 - DNA, 22 bp, synthetic construct
  misc_feature 1..22: note = chemically synthesized
  source 1..22: mol_type = other DNA
ataaaatgactcaggctccact

SEQ ID NO: 47179 - DNA, 22 bp, synthetic construct
  misc_feature 1..22: note = chemically synthesized
  source 1..22: mol_type = other DNA
taaaatgactcaggctccactg

SEQ ID NO: 47180 - DNA, 22 bp, synthetic construct
  misc_feature 1..22: note = chemically synthesized
  source 1..22: mol_type = other DNA
aggctccactgaacatcccagg

SEQ ID NO: 47181 - DNA, 22 bp, synthetic construct
  misc_feature 1..22: note = chemically synthesized
  source 1..22: mol_type = other DNA
cactgaacatcccagggccttg

SEQ ID NO: 47182 - DNA, 22 bp, synthetic construct
  misc_feature 1..22: note = chemically synthesized
  source 1..22: mol_type = other DNA
aacatcccagggccttgtccct

SEQ ID NO: 47183 - DNA, 22 bp, synthetic construct
  misc_feature 1..22: note = chemically synthesized
  source 1..22: mol_type = other DNA
gtccctacaggtttccgtaggc

SEQ ID NO: 47184 - DNA, 22 bp, synthetic construct
  misc_feature 1..22: note = chemically synthesized
  source 1..22: mol_type = other DNA
tccctacaggtttccgtaggca

SEQ ID NO: 47185 - DNA, 22 bp, synthetic construct
  misc_feature 1..22: note = chemically synthesized
  source 1..22: mol_type = other DNA
caggtttccgtaggcagcagat

SEQ ID NO: 47186 - DNA, 22 bp, synthetic construct
  misc_feature 1..22: note = chemically synthesized
  source 1..22: mol_type = other DNA
ccgtaggcagcagatgcattgg

SEQ ID NO: 47187 - DNA, 22 bp, synthetic construct
  misc_feature 1..22: note = chemically synthesized
  source 1..22: mol_type = other DNA
cgtaggcagcagatgcattggc

SEQ ID NO: 47188 - DNA, 22 bp, synthetic construct
  misc_feature 1..22: note = chemically synthesized
  source 1..22: mol_type = other DNA
gcacaagaatggctggcaggca

SEQ ID NO: 47189 - DNA, 22 bp, synthetic construct
  misc_feature 1..22: note = chemically synthesized
  source 1..22: mol_type = other DNA
gcaggcagaccaatgggtttga

SEQ ID NO: 47190 - DNA, 22 bp, synthetic construct
  misc_feature 1..22: note = chemically synthesized
  source 1..22: mol_type = other DNA
gatccaggctctacccctagct

SEQ ID NO: 47191 - DNA, 22 bp, synthetic construct
  misc_feature 1..22: note = chemically synthesized
  source 1..22: mol_type = other DNA
atccaggctctacccctagctg

SEQ ID NO: 47192 - DNA, 22 bp, synthetic construct
  misc_feature 1..22: note = chemically synthesized
  source 1..22: mol_type = other DNA
tacccctagctgtctgtgtggt

SEQ ID NO: 47193 - DNA, 22 bp, synthetic construct
  misc_feature 1..22: note = chemically synthesized
  source 1..22: mol_type = other DNA
cccctagctgtctgtgtggtcc

SEQ ID NO: 47194 - DNA, 22 bp, synthetic construct
  misc_feature 1..22: note = chemically synthesized
  source 1..22: mol_type = other DNA
gctgtctgtgtggtcccctctg

SEQ ID NO: 47195 - DNA, 22 bp, synthetic construct
  misc_feature 1..22: note = chemically synthesized
  source 1..22: mol_type = other DNA
tctgtgtggtcccctctgaact

SEQ ID NO: 47196 - DNA, 22 bp, synthetic construct
  misc_feature 1..22: note = chemically synthesized
  source 1..22: mol_type = other DNA
tgtggtcccctctgaacttcag

SEQ ID NO: 47197 - DNA, 22 bp, synthetic construct
  misc_feature 1..22: note = chemically synthesized
  source 1..22: mol_type = other DNA
tgaacttcagtctcctcgtctt

SEQ ID NO: 47198 - DNA, 22 bp, synthetic construct
  misc_feature 1..22: note = chemically synthesized
  source 1..22: mol_type = other DNA
aacttcagtctcctcgtctttc

SEQ ID NO: 47199 - DNA, 22 bp, synthetic construct
  misc_feature 1..22: note = chemically synthesized
  source 1..22: mol_type = other DNA
cagtctcctcgtctttcaaatg

SEQ ID NO: 47200 - DNA, 22 bp, synthetic construct
  misc_feature 1..22: note = chemically synthesized
  source 1..22: mol_type = other DNA
agtctcctcgtctttcaaatga

SEQ ID NO: 47201 - DNA, 22 bp, synthetic construct
  misc_feature 1..22: note = chemically synthesized
  source 1..22: mol_type = other DNA
ctcgtctttcaaatgaagatag

SEQ ID NO: 47202 - DNA, 22 bp, synthetic construct
  misc_feature 1..22: note = chemically synthesized
  source 1..22: mol_type = other DNA
gtctttcaaatgaagatagacg

SEQ ID NO: 47203 - DNA, 22 bp, synthetic construct
  misc_feature 1..22: note = chemically synthesized
  source 1..22: mol_type = other DNA
tcaaatgaagatagacgtacca

SEQ ID NO: 47204 - DNA, 22 bp, synthetic construct
  misc_feature 1..22: note = chemically synthesized
  source 1..22: mol_type = other DNA
caaatgaagatagacgtaccac

SEQ ID NO: 47205 - DNA, 22 bp, synthetic construct
  misc_feature 1..22: note = chemically synthesized
  source 1..22: mol_type = other DNA
aaatgaagatagacgtaccact

SEQ ID NO: 47206 - DNA, 22 bp, synthetic construct
  misc_feature 1..22: note = chemically synthesized
  source 1..22: mol_type = other DNA
gggcatggccaggcttaaaggg

SEQ ID NO: 47207 - DNA, 22 bp, synthetic construct
  misc_feature 1..22: note = chemically synthesized
  source 1..22: mol_type = other DNA
aaagggaattctatacagaaag

SEQ ID NO: 47208 - DNA, 22 bp, synthetic construct
  misc_feature 1..22: note = chemically synthesized
  source 1..22: mol_type = other DNA
aagggaattctatacagaaagc

SEQ ID NO: 47209 - DNA, 22 bp, synthetic construct
  misc_feature 1..22: note = chemically synthesized
  source 1..22: mol_type = other DNA
tatacagaaagccagtagttac

SEQ ID NO: 47210 - DNA, 22 bp, synthetic construct
  misc_feature 1..22: note = chemically synthesized
  source 1..22: mol_type = other DNA
tacagaaagccagtagttactg

SEQ ID NO: 47211 - DNA, 22 bp, synthetic construct
  misc_feature 1..22: note = chemically synthesized
  source 1..22: mol_type = other DNA
ctgtgcttggtacccgataagt

SEQ ID NO: 47212 - DNA, 22 bp, synthetic construct
  misc_feature 1..22: note = chemically synthesized
  source 1..22: mol_type = other DNA
tgcttggtacccgataagtgct

SEQ ID NO: 47213 - DNA, 22 bp, synthetic construct
  misc_feature 1..22: note = chemically synthesized
  source 1..22: mol_type = other DNA
ggtacccgataagtgctcaata

SEQ ID NO: 47214 - DNA, 22 bp, synthetic construct
  misc_feature 1..22: note = chemically synthesized
  source 1..22: mol_type = other DNA
gtacccgataagtgctcaatac

SEQ ID NO: 47215 - DNA, 22 bp, synthetic construct
  misc_feature 1..22: note = chemically synthesized
  source 1..22: mol_type = other DNA
aatacatacttgctgtcccctt

SEQ ID NO: 47216 - DNA, 22 bp, synthetic construct
  misc_feature 1..22: note = chemically synthesized
  source 1..22: mol_type = other DNA
gctgtccccttctgattttcag

SEQ ID NO: 47217 - DNA, 22 bp, synthetic construct
  misc_feature 1..22: note = chemically synthesized
  source 1..22: mol_type = other DNA
ctgtccccttctgattttcagc

SEQ ID NO: 47218 - DNA, 22 bp, synthetic construct
  misc_feature 1..22: note = chemically synthesized
  source 1..22: mol_type = other DNA
tccccttctgattttcagcaat

SEQ ID NO: 47219 - DNA, 22 bp, synthetic construct
  misc_feature 1..22: note = chemically synthesized
  source 1..22: mol_type = other DNA
ctgattttcagcaatgggccta

SEQ ID NO: 47220 - DNA, 22 bp, synthetic construct
  misc_feature 1..22: note = chemically synthesized
  source 1..22: mol_type = other DNA
tgattttcagcaatgggcctac

SEQ ID NO: 47221 - DNA, 22 bp, synthetic construct
  misc_feature 1..22: note = chemically synthesized
  source 1..22: mol_type = other DNA
attttcagcaatgggcctacta

SEQ ID NO: 47222 - DNA, 22 bp, synthetic construct
  misc_feature 1..22: note = chemically synthesized
  source 1..22: mol_type = other DNA
tcagcaatgggcctactaagca

SEQ ID NO: 47223 - DNA, 22 bp, synthetic construct
  misc_feature 1..22: note = chemically synthesized
  source 1..22: mol_type = other DNA
cagcaatgggcctactaagcac

SEQ ID NO: 47224 - DNA, 22 bp, synthetic construct
  misc_feature 1..22: note = chemically synthesized
  source 1..22: mol_type = other DNA
agcaatgggcctactaagcaca

SEQ ID NO: 47225 - DNA, 22 bp, synthetic construct
  misc_feature 1..22: note = chemically synthesized
  source 1..22: mol_type = other DNA
ctaagcacagtccccagtgtat

SEQ ID NO: 47226 - DNA, 22 bp, synthetic construct
  misc_feature 1..22: note = chemically synthesized
  source 1..22: mol_type = other DNA
agcacagtccccagtgtatatg

SEQ ID NO: 47227 - DNA, 22 bp, synthetic construct
  misc_feature 1..22: note = chemically synthesized
  source 1..22: mol_type = other DNA
tcaggaagtgccattcccaaaa

SEQ ID NO: 47228 - DNA, 22 bp, synthetic construct
  misc_feature 1..22: note = chemically synthesized
  source 1..22: mol_type = other DNA
ccaaaaagggtggctcaccagc

SEQ ID NO: 47229 - DNA, 22 bp, synthetic construct
  misc_feature 1..22: note = chemically synthesized
  source 1..22: mol_type = other DNA
accagctccagcaggtcgccac

SEQ ID NO: 47230 - DNA, 22 bp, synthetic construct
  misc_feature 1..22: note = chemically synthesized
  source 1..22: mol_type = other DNA
cagcaggtcgccactcatcttc

SEQ ID NO: 47231 - DNA, 22 bp, synthetic construct
  misc_feature 1..22: note = chemically synthesized
  source 1..22: mol_type = other DNA
atcttcaccaggaagccaggaa

SEQ ID NO: 47232 - DNA, 22 bp, synthetic construct
  misc_feature 1..22: note = chemically synthesized
  source 1..22: mol_type = other DNA
caccaggaagccaggaagaagg

SEQ ID NO: 47233 - DNA, 22 bp, synthetic construct
  misc_feature 1..22: note = chemically synthesized
  source 1..22: mol_type = other DNA
accaggaagccaggaagaaggc

SEQ ID NO: 47234 - DNA, 22 bp, synthetic construct
  misc_feature 1..22: note = chemically synthesized
  source 1..22: mol_type = other DNA
ggtgaggtatccccggcgggca

SEQ ID NO: 47235 - DNA, 22 bp, synthetic construct
  misc_feature 1..22: note = chemically synthesized
  source 1..22: mol_type = other DNA
gtgaggtatccccggcgggcag

SEQ ID NO: 47236 - DNA, 22 bp, synthetic construct
  misc_feature 1..22: note = chemically synthesized
  source 1..22: mol_type = other DNA
ggcctgcaggcggcgggcagtg

SEQ ID NO: 47237 - DNA, 22 bp, synthetic construct
  misc_feature 1..22: note = chemically synthesized
  source 1..22: mol_type = other DNA
caggcggcgggcagtgcgctct

SEQ ID NO: 47238 - DNA, 22 bp, synthetic construct
  misc_feature 1..22: note = chemically synthesized
  source 1..22: mol_type = other DNA
tgactgcgagaggtgggtctcc

SEQ ID NO: 47239 - DNA, 22 bp, synthetic construct
  misc_feature 1..22: note = chemically synthesized
  source 1..22: mol_type = other DNA
actgcgagaggtgggtctcctc

SEQ ID NO: 47240 - DNA, 22 bp, synthetic construct
  misc_feature 1..22: note = chemically synthesized
  source 1..22: mol_type = other DNA
cgagaggtgggtctcctccttc

SEQ ID NO: 47241 - DNA, 22 bp, synthetic construct
  misc_feature 1..22: note = chemically synthesized
  source 1..22: mol_type = other DNA
ctccttcagcaccaccacgtag

SEQ ID NO: 47242 - DNA, 22 bp, synthetic construct
  misc_feature 1..22: note = chemically synthesized
  source 1..22: mol_type = other DNA
cttcagcaccaccacgtaggtg

SEQ ID NO: 47243 - DNA, 22 bp, synthetic construct
  misc_feature 1..22: note = chemically synthesized
  source 1..22: mol_type = other DNA
cagcaccaccacgtaggtgcca

SEQ ID NO: 47244 - DNA, 22 bp, synthetic construct
  misc_feature 1..22: note = chemically synthesized
  source 1..22: mol_type = other DNA
agcaccaccacgtaggtgccag

SEQ ID NO: 47245 - DNA, 22 bp, synthetic construct
  misc_feature 1..22: note = chemically synthesized
  source 1..22: mol_type = other DNA
cacggatcctggccccatgcaa

SEQ ID NO: 47246 - DNA, 22 bp, synthetic construct
  misc_feature 1..22: note = chemically synthesized
  source 1..22: mol_type = other DNA
gccccatgcaaggaggaacatg

SEQ ID NO: 47247 - DNA, 22 bp, synthetic construct
  misc_feature 1..22: note = chemically synthesized
  source 1..22: mol_type = other DNA
ggtgtactttatctcaccccta

SEQ ID NO: 47248 - DNA, 22 bp, synthetic construct
  misc_feature 1..22: note = chemically synthesized
  source 1..22: mol_type = other DNA
tatctcacccctacttacaaat

SEQ ID NO: 47249 - DNA, 22 bp, synthetic construct
  misc_feature 1..22: note = chemically synthesized
  source 1..22: mol_type = other DNA
atctcacccctacttacaaatt

SEQ ID NO: 47250 - DNA, 22 bp, synthetic construct
  misc_feature 1..22: note = chemically synthesized
  source 1..22: mol_type = other DNA
tctcacccctacttacaaatta

SEQ ID NO: 47251 - DNA, 22 bp, synthetic construct
  misc_feature 1..22: note = chemically synthesized
  source 1..22: mol_type = other DNA
acccctacttacaaattacaac

SEQ ID NO: 47252 - DNA, 22 bp, synthetic construct
  misc_feature 1..22: note = chemically synthesized
  source 1..22: mol_type = other DNA
cttacaaattacaacaaaagag

SEQ ID NO: 47253 - DNA, 22 bp, synthetic construct
  misc_feature 1..22: note = chemically synthesized
  source 1..22: mol_type = other DNA
acaaattacaacaaaagagaca

SEQ ID NO: 47254 - DNA, 22 bp, synthetic construct
  misc_feature 1..22: note = chemically synthesized
  source 1..22: mol_type = other DNA
caaattacaacaaaagagacac

SEQ ID NO: 47255 - DNA, 22 bp, synthetic construct
  misc_feature 1..22: note = chemically synthesized
  source 1..22: mol_type = other DNA
caacaaaagagacacaacagag

SEQ ID NO: 47256 - DNA, 22 bp, synthetic construct
  misc_feature 1..22: note = chemically synthesized
  source 1..22: mol_type = other DNA
ccaaatgcggaccaaaaagcaa

SEQ ID NO: 47257 - DNA, 22 bp, synthetic construct
  misc_feature 1..22: note = chemically synthesized
  source 1..22: mol_type = other DNA
aagaactcatataggccaacta

SEQ ID NO: 47258 - DNA, 22 bp, synthetic construct
  misc_feature 1..22: note = chemically synthesized
  source 1..22: mol_type = other DNA
atataggccaactattattatt

SEQ ID NO: 47259 - DNA, 22 bp, synthetic construct
  misc_feature 1..22: note = chemically synthesized
  source 1..22: mol_type = other DNA
ttattattcacatggttatata

SEQ ID NO: 47260 - DNA, 22 bp, synthetic construct
  misc_feature 1..22: note = chemically synthesized
  source 1..22: mol_type = other DNA
ttattcacatggttatataaca

SEQ ID NO: 47261 - DNA, 22 bp, synthetic construct
  misc_feature 1..22: note = chemically synthesized
  source 1..22: mol_type = other DNA
ttcacatggttatataacactt

SEQ ID NO: 47262 - DNA, 22 bp, synthetic construct
  misc_feature 1..22: note = chemically synthesized
  source 1..22: mol_type = other DNA
acatggttatataacactttca

SEQ ID NO: 47263 - DNA, 22 bp, synthetic construct
  misc_feature 1..22: note = chemically synthesized
  source 1..22: mol_type = other DNA
tataacactttcaaatgtgcca

SEQ ID NO: 47264 - DNA, 22 bp, synthetic construct
  misc_feature 1..22: note = chemically synthesized
  source 1..22: mol_type = other DNA
tcaaatgtgccattcaggcaaa

SEQ ID NO: 47265 - DNA, 22 bp, synthetic construct
  misc_feature 1..22: note = chemically synthesized
  source 1..22: mol_type = other DNA
caaatgtgccattcaggcaaaa

SEQ ID NO: 47266 - DNA, 22 bp, synthetic construct
  misc_feature 1..22: note = chemically synthesized
  source 1..22: mol_type = other DNA
aaatgtgccattcaggcaaaaa

SEQ ID NO: 47267 - DNA, 22 bp, synthetic construct
  misc_feature 1..22: note = chemically synthesized
  source 1..22: mol_type = other DNA
aggcaaaaatgggaactacggg

SEQ ID NO: 47268 - DNA, 22 bp, synthetic construct
  misc_feature 1..22: note = chemically synthesized
  source 1..22: mol_type = other DNA
cgggccacactcgacaacaggt

SEQ ID NO: 47269 - DNA, 22 bp, synthetic construct
  misc_feature 1..22: note = chemically synthesized
  source 1..22: mol_type = other DNA
gacaacaggttttcctctgtac

SEQ ID NO: 47270 - DNA, 22 bp, synthetic construct
  misc_feature 1..22: note = chemically synthesized
  source 1..22: mol_type = other DNA
tcctctgtacctgcacccagct

SEQ ID NO: 47271 - DNA, 22 bp, synthetic construct
  misc_feature 1..22: note = chemically synthesized
  source 1..22: mol_type = other DNA
cctctgtacctgcacccagctc

SEQ ID NO: 47272 - DNA, 22 bp, synthetic construct
  misc_feature 1..22: note = chemically synthesized
  source 1..22: mol_type = other DNA
ctctgtacctgcacccagctct

SEQ ID NO: 47273 - DNA, 22 bp, synthetic construct
  misc_feature 1..22: note = chemically synthesized
  source 1..22: mol_type = other DNA
tgtacctgcacccagctctcta

SEQ ID NO: 47274 - DNA, 22 bp, synthetic construct
  misc_feature 1..22: note = chemically synthesized
  source 1..22: mol_type = other DNA
tacctgcacccagctctctacg

SEQ ID NO: 47275 - DNA, 22 bp, synthetic construct
  misc_feature 1..22: note = chemically synthesized
  source 1..22: mol_type = other DNA
cacccagctctctacgggcctg

SEQ ID NO: 47276 - DNA, 22 bp, synthetic construct
  misc_feature 1..22: note = chemically synthesized
  source 1..22: mol_type = other DNA
tctacgggcctggtcgctcctg

SEQ ID NO: 47277 - DNA, 22 bp, synthetic construct
  misc_feature 1..22: note = chemically synthesized
  source 1..22: mol_type = other DNA
tacgggcctggtcgctcctggt

SEQ ID NO: 47278 - DNA, 22 bp, synthetic construct
  misc_feature 1..22: note = chemically synthesized
  source 1..22: mol_type = other DNA
cgggcctggtcgctcctggtgg

SEQ ID NO: 47279 - DNA, 22 bp, synthetic construct
  misc_feature 1..22: note = chemically synthesized
  source 1..22: mol_type = other DNA
gtcgctcctggtggccctgccc

SEQ ID NO: 47280 - DNA, 22 bp, synthetic construct
  misc_feature 1..22: note = chemically synthesized
  source 1..22: mol_type = other DNA
ctggtggccctgcccaaaggcc

SEQ ID NO: 47281 - DNA, 22 bp, synthetic construct
  misc_feature 1..22: note = chemically synthesized
  source 1..22: mol_type = other DNA
gtggccctgcccaaaggccacc

SEQ ID NO: 47282 - DNA, 22 bp, synthetic construct
  misc_feature 1..22: note = chemically synthesized
  source 1..22: mol_type = other DNA
cccaaaggccaccccctccccc

SEQ ID NO: 47283 - DNA, 22 bp, synthetic construct
  misc_feature 1..22: note = chemically synthesized
  source 1..22: mol_type = other DNA
ccccatgccccagtcagaataa

SEQ ID NO: 47284 - DNA, 22 bp, synthetic construct
  misc_feature 1..22: note = chemically synthesized
  source 1..22: mol_type = other DNA
agggaaaaaatcatgggctttg

SEQ ID NO: 47285 - DNA, 22 bp, synthetic construct
  misc_feature 1..22: note = chemically synthesized
  source 1..22: mol_type = other DNA
tggagccaggaaaccgtggacc

SEQ ID NO: 47286 - DNA, 22 bp, synthetic construct
  misc_feature 1..22: note = chemically synthesized
  source 1..22: mol_type = other DNA
ggagccaggaaaccgtggacct

SEQ ID NO: 47287 - DNA, 22 bp, synthetic construct
  misc_feature 1..22: note = chemically synthesized
  source 1..22: mol_type = other DNA
gagccaggaaaccgtggacctg

SEQ ID NO: 47288 - DNA, 22 bp, synthetic construct
  misc_feature 1..22: note = chemically synthesized
  source 1..22: mol_type = other DNA
aattccagctccaatatttact

SEQ ID NO: 47289 - DNA, 22 bp, synthetic construct
  misc_feature 1..22: note = chemically synthesized
  source 1..22: mol_type = other DNA
cagctccaatatttactggttg

SEQ ID NO: 47290 - DNA, 22 bp, synthetic construct
  misc_feature 1..22: note = chemically synthesized
  source 1..22: mol_type = other DNA
caatatttactggttgtgcagc

SEQ ID NO: 47291 - DNA, 22 bp, synthetic construct
  misc_feature 1..22: note = chemically synthesized
  source 1..22: mol_type = other DNA
actggttgtgcagccatgagca

SEQ ID NO: 47292 - DNA, 22 bp, synthetic construct
  misc_feature 1..22: note = chemically synthesized
  source 1..22: mol_type = other DNA
ctggttgtgcagccatgagcaa

SEQ ID NO: 47293 - DNA, 22 bp, synthetic construct
  misc_feature 1..22: note = chemically synthesized
  source 1..22: mol_type = other DNA
gttgtgcagccatgagcaagtc

SEQ ID NO: 47294 - DNA, 22 bp, synthetic construct
  misc_feature 1..22: note = chemically synthesized
  source 1..22: mol_type = other DNA
tgcagccatgagcaagtcactc

SEQ ID NO: 47295 - DNA, 22 bp, synthetic construct
  misc_feature 1..22: note = chemically synthesized
  source 1..22: mol_type = other DNA
aacctctcggagcctcagatac

SEQ ID NO: 47296 - DNA, 22 bp, synthetic construct
  misc_feature 1..22: note = chemically synthesized
  source 1..22: mol_type = other DNA
tcggagcctcagatacctctgc

SEQ ID NO: 47297 - DNA, 22 bp, synthetic construct
  misc_feature 1..22: note = chemically synthesized
  source 1..22: mol_type = other DNA
ggagcctcagatacctctgctg

SEQ ID NO: 47298 - DNA, 22 bp, synthetic construct
  misc_feature 1..22: note = chemically synthesized
  source 1..22: mol_type = other DNA
agatacctctgctgtattgtag

SEQ ID NO: 47299 - DNA, 22 bp, synthetic construct
  misc_feature 1..22: note = chemically synthesized
  source 1..22: mol_type = other DNA
tgctgtattgtagagaccacag

SEQ ID NO: 47300 - DNA, 22 bp, synthetic construct
  misc_feature 1..22: note = chemically synthesized
  source 1..22: mol_type = other DNA
ctgtattgtagagaccacagta

SEQ ID NO: 47301 - DNA, 22 bp, synthetic construct
  misc_feature 1..22: note = chemically synthesized
  source 1..22: mol_type = other DNA
tattgtagagaccacagtacct

SEQ ID NO: 47302 - DNA, 22 bp, synthetic construct
  misc_feature 1..22: note = chemically synthesized
  source 1..22: mol_type = other DNA
tagagaccacagtacctatgac

SEQ ID NO: 47303 - DNA, 22 bp, synthetic construct
  misc_feature 1..22: note = chemically synthesized
  source 1..22: mol_type = other DNA
tgacataggcctgctgggaaag

SEQ ID NO: 47304 - DNA, 22 bp, synthetic construct
  misc_feature 1..22: note = chemically synthesized
  source 1..22: mol_type = other DNA
ctgggaaagtcaagagtgacgg

SEQ ID NO: 47305 - DNA, 22 bp, synthetic construct
  misc_feature 1..22: note = chemically synthesized
  source 1..22: mol_type = other DNA
ggaaagtcaagagtgacggtta

SEQ ID NO: 47306 - DNA, 22 bp, synthetic construct
  misc_feature 1..22: note = chemically synthesized
  source 1..22: mol_type = other DNA
tataaatctcccatccagatgc

SEQ ID NO: 47307 - DNA, 22 bp, synthetic construct
  misc_feature 1..22: note = chemically synthesized
  source 1..22: mol_type = other DNA
ccatccagatgctctacaaatg

SEQ ID NO: 47308 - DNA, 22 bp, synthetic construct
  misc_feature 1..22: note = chemically synthesized
  source 1..22: mol_type = other DNA
tacaaatgcaggcagaagggat

SEQ ID NO: 47309 - DNA, 22 bp, synthetic construct
  misc_feature 1..22: note = chemically synthesized
  source 1..22: mol_type = other DNA
caaatgcaggcagaagggatga

SEQ ID NO: 47310 - DNA, 22 bp, synthetic construct
  misc_feature 1..22: note = chemically synthesized
  source 1..22: mol_type = other DNA
agtgagcaaaggcaacacttct

SEQ ID NO: 47311 - DNA, 22 bp, synthetic construct
  misc_feature 1..22: note = chemically synthesized
  source 1..22: mol_type = other DNA
cttaaagagagagaaaagtcaa

SEQ ID NO: 47312 - DNA, 22 bp, synthetic construct
  misc_feature 1..22: note = chemically synthesized
  source 1..22: mol_type = other DNA
ttaaagagagagaaaagtcaag

SEQ ID NO: 47313 - DNA, 22 bp, synthetic construct
  misc_feature 1..22: note = chemically synthesized
  source 1..22: mol_type = other DNA
aaagagagagaaaagtcaaggc

SEQ ID NO: 47314 - DNA, 22 bp, synthetic construct
  misc_feature 1..22: note = chemically synthesized
  source 1..22: mol_type = other DNA
aagagagagaaaagtcaaggcc

SEQ ID NO: 47315 - DNA, 22 bp, synthetic construct
  misc_feature 1..22: note = chemically synthesized
  source 1..22: mol_type = other DNA
tcttagtccttttgtgttgcta

SEQ ID NO: 47316 - DNA, 22 bp, synthetic construct
  misc_feature 1..22: note = chemically synthesized
  source 1..22: mol_type = other DNA
agtccttttgtgttgctatata

SEQ ID NO: 47317 - DNA, 22 bp, synthetic construct
  misc_feature 1..22: note = chemically synthesized
  source 1..22: mol_type = other DNA
gtccttttgtgttgctatataa

SEQ ID NO: 47318 - DNA, 22 bp, synthetic construct
  misc_feature 1..22: note = chemically synthesized
  source 1..22: mol_type = other DNA
ttgtgttgctatataaaggaat

SEQ ID NO: 47319 - DNA, 22 bp, synthetic construct
  misc_feature 1..22: note = chemically synthesized
  source 1..22: mol_type = other DNA
tgtgttgctatataaaggaata

SEQ ID NO: 47320 - DNA, 22 bp, synthetic construct
  misc_feature 1..22: note = chemically synthesized
  source 1..22: mol_type = other DNA
gtgttgctatataaaggaatac

SEQ ID NO: 47321 - DNA, 22 bp, synthetic construct
  misc_feature 1..22: note = chemically synthesized
  source 1..22: mol_type = other DNA
tgttgctatataaaggaatacc

SEQ ID NO: 47322 - DNA, 22 bp, synthetic construct
  misc_feature 1..22: note = chemically synthesized
  source 1..22: mol_type = other DNA
ctatataaaggaatacctgaag

SEQ ID NO: 47323 - DNA, 22 bp, synthetic construct
  misc_feature 1..22: note = chemically synthesized
  source 1..22: mol_type = other DNA
tataaaggaatacctgaaggtg

SEQ ID NO: 47324 - DNA, 22 bp, synthetic construct
  misc_feature 1..22: note = chemically synthesized
  source 1..22: mol_type = other DNA
aaggtgagtaatttacaaggaa

SEQ ID NO: 47325 - DNA, 22 bp, synthetic construct
  misc_feature 1..22: note = chemically synthesized
  source 1..22: mol_type = other DNA
acaaggaaaagggatttattca

SEQ ID NO: 47326 - DNA, 22 bp, synthetic construct
  misc_feature 1..22: note = chemically synthesized
  source 1..22: mol_type = other DNA
caaggaaaagggatttattcag

SEQ ID NO: 47327 - DNA, 22 bp, synthetic construct
  misc_feature 1..22: note = chemically synthesized
  source 1..22: mol_type = other DNA
attcagctcatgattctgcaag

SEQ ID NO: 47328 - DNA, 22 bp, synthetic construct
  misc_feature 1..22: note = chemically synthesized
  source 1..22: mol_type = other DNA
ttcagctcatgattctgcaagc

SEQ ID NO: 47329 - DNA, 22 bp, synthetic construct
  misc_feature 1..22: note = chemically synthesized
  source 1..22: mol_type = other DNA
agctcatgattctgcaagctct

SEQ ID NO: 47330 - DNA, 22 bp, synthetic construct
  misc_feature 1..22: note = chemically synthesized
  source 1..22: mol_type = other DNA
atgattctgcaagctctccagg

SEQ ID NO: 47331 - DNA, 22 bp, synthetic construct
  misc_feature 1..22: note = chemically synthesized
  source 1..22: mol_type = other DNA
tgcaagctctccaggaagcatg

SEQ ID NO: 47332 - DNA, 22 bp, synthetic construct
  misc_feature 1..22: note = chemically synthesized
  source 1..22: mol_type = other DNA
caagctctccaggaagcatggc

SEQ ID NO: 47333 - DNA, 22 bp, synthetic construct
  misc_feature 1..22: note = chemically synthesized
  source 1..22: mol_type = other DNA
tccaggaagcatggcaccagca

SEQ ID NO: 47334 - DNA, 22 bp, synthetic construct
  misc_feature 1..22: note = chemically synthesized
  source 1..22: mol_type = other DNA
caggaagcatggcaccagcatc

SEQ ID NO: 47335 - DNA, 22 bp, synthetic construct
  misc_feature 1..22: note = chemically synthesized
  source 1..22: mol_type = other DNA
cttctggtgagggccttaagct

SEQ ID NO: 47336 - DNA, 22 bp, synthetic construct
  misc_feature 1..22: note = chemically synthesized
  source 1..22: mol_type = other DNA
ctggtgagggccttaagctgct

SEQ ID NO: 47337 - DNA, 22 bp, synthetic construct
  misc_feature 1..22: note = chemically synthesized
  source 1..22: mol_type = other DNA
tggtgagggccttaagctgctt

SEQ ID NO: 47338 - DNA, 22 bp, synthetic construct
  misc_feature 1..22: note = chemically synthesized
  source 1..22: mol_type = other DNA
gtgagggccttaagctgctttc

SEQ ID NO: 47339 - DNA, 22 bp, synthetic construct
  misc_feature 1..22: note = chemically synthesized
  source 1..22: mol_type = other DNA
aagctgctttcactgatggcag

SEQ ID NO: 47340 - DNA, 22 bp, synthetic construct
  misc_feature 1..22: note = chemically synthesized
  source 1..22: mol_type = other DNA
agctgctttcactgatggcaga

SEQ ID NO: 47341 - DNA, 22 bp, synthetic construct
  misc_feature 1..22: note = chemically synthesized
  source 1..22: mol_type = other DNA
ctttcactgatggcagaaggtg

SEQ ID NO: 47342 - DNA, 22 bp, synthetic construct
  misc_feature 1..22: note = chemically synthesized
  source 1..22: mol_type = other DNA
tcactgatggcagaaggtgaag

SEQ ID NO: 47343 - DNA, 22 bp, synthetic construct
  misc_feature 1..22: note = chemically synthesized
  source 1..22: mol_type = other DNA
cactgatggcagaaggtgaagg

SEQ ID NO: 47344 - DNA, 22 bp, synthetic construct
  misc_feature 1..22: note = chemically synthesized
  source 1..22: mol_type = other DNA
actgatggcagaaggtgaaggg

SEQ ID NO: 47345 - DNA, 22 bp, synthetic construct
  misc_feature 1..22: note = chemically synthesized
  source 1..22: mol_type = other DNA
atggcagaaggtgaaggggagc

SEQ ID NO: 47346 - DNA, 22 bp, synthetic construct
  misc_feature 1..22: note = chemically synthesized
  source 1..22: mol_type = other DNA
catgtgcagagatcaatcacat

SEQ ID NO: 47347 - DNA, 22 bp, synthetic construct
  misc_feature 1..22: note = chemically synthesized
  source 1..22: mol_type = other DNA
tttttaataatcagccttcaag

SEQ ID NO: 47348 - DNA, 22 bp, synthetic construct
  misc_feature 1..22: note = chemically synthesized
  source 1..22: mol_type = other DNA
tttaataatcagccttcaaggg

SEQ ID NO: 47349 - DNA, 22 bp, synthetic construct
  misc_feature 1..22: note = chemically synthesized
  source 1..22: mol_type = other DNA
ttaataatcagccttcaaggga

SEQ ID NO: 47350 - DNA, 22 bp, synthetic construct
  misc_feature 1..22: note = chemically synthesized
  source 1..22: mol_type = other DNA
taataatcagccttcaagggaa

SEQ ID NO: 47351 - DNA, 22 bp, synthetic construct
  misc_feature 1..22: note = chemically synthesized
  source 1..22: mol_type = other DNA
aataatcagccttcaagggaaa

SEQ ID NO: 47352 - DNA, 22 bp, synthetic construct
  misc_feature 1..22: note = chemically synthesized
  source 1..22: mol_type = other DNA
ataatcagccttcaagggaaat

SEQ ID NO: 47353 - DNA, 22 bp, synthetic construct
  misc_feature 1..22: note = chemically synthesized
  source 1..22: mol_type = other DNA
caagggaaatcatagcgggaga

SEQ ID NO: 47354 - DNA, 22 bp, synthetic construct
  misc_feature 1..22: note = chemically synthesized
  source 1..22: mol_type = other DNA
aagggaaatcatagcgggagaa

SEQ ID NO: 47355 - DNA, 22 bp, synthetic construct
  misc_feature 1..22: note = chemically synthesized
  source 1..22: mol_type = other DNA
actcattatcacaaggacggca

SEQ ID NO: 47356 - DNA, 22 bp, synthetic construct
  misc_feature 1..22: note = chemically synthesized
  source 1..22: mol_type = other DNA
ctcattatcacaaggacggcac

SEQ ID NO: 47357 - DNA, 22 bp, synthetic construct
  misc_feature 1..22: note = chemically synthesized
  source 1..22: mol_type = other DNA
attatcacaaggacggcaccaa

SEQ ID NO: 47358 - DNA, 22 bp, synthetic construct
  misc_feature 1..22: note = chemically synthesized
  source 1..22: mol_type = other DNA
tcacaaggacggcaccaagcct

SEQ ID NO: 47359 - DNA, 22 bp, synthetic construct
  misc_feature 1..22: note = chemically synthesized
  source 1..22: mol_type = other DNA
tcacaggggttcctcccccatg

SEQ ID NO: 47360 - DNA, 22 bp, synthetic construct
  misc_feature 1..22: note = chemically synthesized
  source 1..22: mol_type = other DNA
cacaggggttcctcccccatga

SEQ ID NO: 47361 - DNA, 22 bp, synthetic construct
  misc_feature 1..22: note = chemically synthesized
  source 1..22: mol_type = other DNA
acaggggttcctcccccatgac

SEQ ID NO: 47362 - DNA, 22 bp, synthetic construct
  misc_feature 1..22: note = chemically synthesized
  source 1..22: mol_type = other DNA
ctcccccatgacccaaacacct

SEQ ID NO: 47363 - DNA, 22 bp, synthetic construct
  misc_feature 1..22: note = chemically synthesized
  source 1..22: mol_type = other DNA
ccccatgacccaaacacctccc

SEQ ID NO: 47364 - DNA, 22 bp, synthetic construct
  misc_feature 1..22: note = chemically synthesized
  source 1..22: mol_type = other DNA
ccattaggccccacttccaaca

SEQ ID NO: 47365 - DNA, 22 bp, synthetic construct
  misc_feature 1..22: note = chemically synthesized
  source 1..22: mol_type = other DNA
ggccccacttccaacactgagg

SEQ ID NO: 47366 - DNA, 22 bp, synthetic construct
  misc_feature 1..22: note = chemically synthesized
  source 1..22: mol_type = other DNA
ccaacactgaggaccaaatttc

SEQ ID NO: 47367 - DNA, 22 bp, synthetic construct
  misc_feature 1..22: note = chemically synthesized
  source 1..22: mol_type = other DNA
caacactgaggaccaaatttcc

SEQ ID NO: 47368 - DNA, 22 bp, synthetic construct
  misc_feature 1..22: note = chemically synthesized
  source 1..22: mol_type = other DNA
aggaccaaatttccacatgaga

SEQ ID NO: 47369 - DNA, 22 bp, synthetic construct
  misc_feature 1..22: note = chemically synthesized
  source 1..22: mol_type = other DNA
ccacatgagatttggaggggac

SEQ ID NO: 47370 - DNA, 22 bp, synthetic construct
  misc_feature 1..22: note = chemically synthesized
  source 1..22: mol_type = other DNA
cacatgagatttggaggggaca

SEQ ID NO: 47371 - DNA, 22 bp, synthetic construct
  misc_feature 1..22: note = chemically synthesized
  source 1..22: mol_type = other DNA
ggaggggacaaacaaattatag

SEQ ID NO: 47372 - DNA, 22 bp, synthetic construct
  misc_feature 1..22: note = chemically synthesized
  source 1..22: mol_type = other DNA
gaggggacaaacaaattatagc

SEQ ID NO: 47373 - DNA, 22 bp, synthetic construct
  misc_feature 1..22: note = chemically synthesized
  source 1..22: mol_type = other DNA
tagcagccactatctatggtga

SEQ ID NO: 47374 - DNA, 22 bp, synthetic construct
  misc_feature 1..22: note = chemically synthesized
  source 1..22: mol_type = other DNA
tctatggtgatttgtttggttt

SEQ ID NO: 47375 - DNA, 22 bp, synthetic construct
  misc_feature 1..22: note = chemically synthesized
  source 1..22: mol_type = other DNA
tggtgatttgtttggtttttag

SEQ ID NO: 47376 - DNA, 22 bp, synthetic construct
  misc_feature 1..22: note = chemically synthesized
  source 1..22: mol_type = other DNA
gtttggtttttagctcttgtct

SEQ ID NO: 47377 - DNA, 22 bp, synthetic construct
  misc_feature 1..22: note = chemically synthesized
  source 1..22: mol_type = other DNA
tttggtttttagctcttgtctg

SEQ ID NO: 47378 - DNA, 22 bp, synthetic construct
  misc_feature 1..22: note = chemically synthesized
  source 1..22: mol_type = other DNA
ggtttttagctcttgtctgctc

SEQ ID NO: 47379 - DNA, 22 bp, synthetic construct
  misc_feature 1..22: note = chemically synthesized
  source 1..22: mol_type = other DNA
gtttttagctcttgtctgctcc

SEQ ID NO: 47380 - DNA, 22 bp, synthetic construct
  misc_feature 1..22: note = chemically synthesized
  source 1..22: mol_type = other DNA
ttagctcttgtctgctccaact

SEQ ID NO: 47381 - DNA, 22 bp, synthetic construct
  misc_feature 1..22: note = chemically synthesized
  source 1..22: mol_type = other DNA
tagctcttgtctgctccaactg

SEQ ID NO: 47382 - DNA, 22 bp, synthetic construct
  misc_feature 1..22: note = chemically synthesized
  source 1..22: mol_type = other DNA
agctcttgtctgctccaactgc

SEQ ID NO: 47383 - DNA, 22 bp, synthetic construct
  misc_feature 1..22: note = chemically synthesized
  source 1..22: mol_type = other DNA
gctcttgtctgctccaactgct

SEQ ID NO: 47384 - DNA, 22 bp, synthetic construct
  misc_feature 1..22: note = chemically synthesized
  source 1..22: mol_type = other DNA
ttgtctgctccaactgctctca

SEQ ID NO: 47385 - DNA, 22 bp, synthetic construct
  misc_feature 1..22: note = chemically synthesized
  source 1..22: mol_type = other DNA
gtctgctccaactgctctcagg

SEQ ID NO: 47386 - DNA, 22 bp, synthetic construct
  misc_feature 1..22: note = chemically synthesized
  source 1..22: mol_type = other DNA
tctgctccaactgctctcaggc

SEQ ID NO: 47387 - DNA, 22 bp, synthetic construct
  misc_feature 1..22: note = chemically synthesized
  source 1..22: mol_type = other DNA
ctccaactgctctcaggcagac

SEQ ID NO: 47388 - DNA, 22 bp, synthetic construct
  misc_feature 1..22: note = chemically synthesized
  source 1..22: mol_type = other DNA
caactgctctcaggcagacata

SEQ ID NO: 47389 - DNA, 22 bp, synthetic construct
  misc_feature 1..22: note = chemically synthesized
  source 1..22: mol_type = other DNA
ctctcaggcagacatacctgct

SEQ ID NO: 47390 - DNA, 22 bp, synthetic construct
  misc_feature 1..22: note = chemically synthesized
  source 1..22: mol_type = other DNA
tcaggcagacatacctgcttaa

SEQ ID NO: 47391 - DNA, 22 bp, synthetic construct
  misc_feature 1..22: note = chemically synthesized
  source 1..22: mol_type = other DNA
aggcagacatacctgcttaaga

SEQ ID NO: 47392 - DNA, 22 bp, synthetic construct
  misc_feature 1..22: note = chemically synthesized
  source 1..22: mol_type = other DNA
cttaagaaccttcactggctcc

SEQ ID NO: 47393 - DNA, 22 bp, synthetic construct
  misc_feature 1..22: note = chemically synthesized
  source 1..22: mol_type = other DNA
aagaaccttcactggctcccca

SEQ ID NO: 47394 - DNA, 22 bp, synthetic construct
  misc_feature 1..22: note = chemically synthesized
  source 1..22: mol_type = other DNA
agaaccttcactggctccccac

SEQ ID NO: 47395 - DNA, 22 bp, synthetic construct
  misc_feature 1..22: note = chemically synthesized
  source 1..22: mol_type = other DNA
cactggctccccacagcctcat

SEQ ID NO: 47396 - DNA, 22 bp, synthetic construct
  misc_feature 1..22: note = chemically synthesized
  source 1..22: mol_type = other DNA
actggctccccacagcctcatg

SEQ ID NO: 47397 - DNA, 22 bp, synthetic construct
  misc_feature 1..22: note = chemically synthesized
  source 1..22: mol_type = other DNA
gctccccacagcctcatgaatc

SEQ ID NO: 47398 - DNA, 22 bp, synthetic construct
  misc_feature 1..22: note = chemically synthesized
  source 1..22: mol_type = other DNA
cccacagcctcatgaatcaagt

SEQ ID NO: 47399 - DNA, 22 bp, synthetic construct
  misc_feature 1..22: note = chemically synthesized
  source 1..22: mol_type = other DNA
atgaatcaagtccaaactccat

SEQ ID NO: 47400 - DNA, 22 bp, synthetic construct
  misc_feature 1..22: note = chemically synthesized
  source 1..22: mol_type = other DNA
catgctcctccttggcccctac

SEQ ID NO: 47401 - DNA, 22 bp, synthetic construct
  misc_feature 1..22: note = chemically synthesized
  source 1..22: mol_type = other DNA
ctccttggcccctacctcaacc

SEQ ID NO: 47402 - DNA, 22 bp, synthetic construct
  misc_feature 1..22: note = chemically synthesized
  source 1..22: mol_type = other DNA
cttggcccctacctcaacctac

SEQ ID NO: 47403 - DNA, 22 bp, synthetic construct
  misc_feature 1..22: note = chemically synthesized
  source 1..22: mol_type = other DNA
ggcccctacctcaacctacctt

SEQ ID NO: 47404 - DNA, 22 bp, synthetic construct
  misc_feature 1..22: note = chemically synthesized
  source 1..22: mol_type = other DNA
gcccctacctcaacctaccttg

SEQ ID NO: 47405 - DNA, 22 bp, synthetic construct
  misc_feature 1..22: note = chemically synthesized
  source 1..22: mol_type = other DNA
cctcaacctaccttgcagcccc

SEQ ID NO: 47406 - DNA, 22 bp, synthetic construct
  misc_feature 1..22: note = chemically synthesized
  source 1..22: mol_type = other DNA
aacctaccttgcagccccatca

SEQ ID NO: 47407 - DNA, 22 bp, synthetic construct
  misc_feature 1..22: note = chemically synthesized
  source 1..22: mol_type = other DNA
ccttgcagccccatcacccata

SEQ ID NO: 47408 - DNA, 22 bp, synthetic construct
  misc_feature 1..22: note = chemically synthesized
  source 1..22: mol_type = other DNA
gcagccccatcacccatatctc

SEQ ID NO: 47409 - DNA, 22 bp, synthetic construct
  misc_feature 1..22: note = chemically synthesized
  source 1..22: mol_type = other DNA
cagccccatcacccatatctct

SEQ ID NO: 47410 - DNA, 22 bp, synthetic construct
  misc_feature 1..22: note = chemically synthesized
  source 1..22: mol_type = other DNA
tgtatatatgcatcttggactc

SEQ ID NO: 47411 - DNA, 22 bp, synthetic construct
  misc_feature 1..22: note = chemically synthesized
  source 1..22: mol_type = other DNA
tatatatgcatcttggactcca

SEQ ID NO: 47412 - DNA, 22 bp, synthetic construct
  misc_feature 1..22: note = chemically synthesized
  source 1..22: mol_type = other DNA
ggactccagtcagagtagaaca

SEQ ID NO: 47413 - DNA, 22 bp, synthetic construct
  misc_feature 1..22: note = chemically synthesized
  source 1..22: mol_type = other DNA
gactccagtcagagtagaacag

SEQ ID NO: 47414 - DNA, 22 bp, synthetic construct
  misc_feature 1..22: note = chemically synthesized
  source 1..22: mol_type = other DNA
cagtcagagtagaacagagtcc

SEQ ID NO: 47415 - DNA, 22 bp, synthetic construct
  misc_feature 1..22: note = chemically synthesized
  source 1..22: mol_type = other DNA
tacccaaagccttagggccaaa

SEQ ID NO: 47416 - DNA, 22 bp, synthetic construct
  misc_feature 1..22: note = chemically synthesized
  source 1..22: mol_type = other DNA
acccaaagccttagggccaaaa

SEQ ID NO: 47417 - DNA, 22 bp, synthetic construct
  misc_feature 1..22: note = chemically synthesized
  source 1..22: mol_type = other DNA
cccaaagccttagggccaaaac

SEQ ID NO: 47418 - DNA, 22 bp, synthetic construct
  misc_feature 1..22: note = chemically synthesized
  source 1..22: mol_type = other DNA
agggccaaaacggttttgaacc

SEQ ID NO: 47419 - DNA, 22 bp, synthetic construct
  misc_feature 1..22: note = chemically synthesized
  source 1..22: mol_type = other DNA
gggccaaaacggttttgaacct

SEQ ID NO: 47420 - DNA, 22 bp, synthetic construct
  misc_feature 1..22: note = chemically synthesized
  source 1..22: mol_type = other DNA
tgaacctcagaacttgtttgga

SEQ ID NO: 47421 - DNA, 22 bp, synthetic construct
  misc_feature 1..22: note = chemically synthesized
  source 1..22: mol_type = other DNA
gaacctcagaacttgtttggat

SEQ ID NO: 47422 - DNA, 22 bp, synthetic construct
  misc_feature 1..22: note = chemically synthesized
  source 1..22: mol_type = other DNA
aacctcagaacttgtttggatt

SEQ ID NO: 47423 - DNA, 22 bp, synthetic construct
  misc_feature 1..22: note = chemically synthesized
  source 1..22: mol_type = other DNA
agaacttgtttggattttagaa

SEQ ID NO: 47424 - DNA, 22 bp, synthetic construct
  misc_feature 1..22: note = chemically synthesized
  source 1..22: mol_type = other DNA
gtttggattttagaaaggcagt

SEQ ID NO: 47425 - DNA, 22 bp, synthetic construct
  misc_feature 1..22: note = chemically synthesized
  source 1..22: mol_type = other DNA
tttggattttagaaaggcagta

SEQ ID NO: 47426 - DNA, 22 bp, synthetic construct
  misc_feature 1..22: note = chemically synthesized
  source 1..22: mol_type = other DNA
ggattttagaaaggcagtaatg

SEQ ID NO: 47427 - DNA, 22 bp, synthetic construct
  misc_feature 1..22: note = chemically synthesized
  source 1..22: mol_type = other DNA
gattttagaaaggcagtaatgg

SEQ ID NO: 47428 - DNA, 22 bp, synthetic construct
  misc_feature 1..22: note = chemically synthesized
  source 1..22: mol_type = other DNA
tagaaaggcagtaatgggcaat

SEQ ID NO: 47429 - DNA, 22 bp, synthetic construct
  misc_feature 1..22: note = chemically synthesized
  source 1..22: mol_type = other DNA
agaaaggcagtaatgggcaatc

SEQ ID NO: 47430 - DNA, 22 bp, synthetic construct
  misc_feature 1..22: note = chemically synthesized
  source 1..22: mol_type = other DNA
gaaaggcagtaatgggcaatca

SEQ ID NO: 47431 - DNA, 22 bp, synthetic construct
  misc_feature 1..22: note = chemically synthesized
  source 1..22: mol_type = other DNA
cttggaagaatctggagctgca

SEQ ID NO: 47432 - DNA, 22 bp, synthetic construct
  misc_feature 1..22: note = chemically synthesized
  source 1..22: mol_type = other DNA
ggaagaatctggagctgcatac

SEQ ID NO: 47433 - DNA, 22 bp, synthetic construct
  misc_feature 1..22: note = chemically synthesized
  source 1..22: mol_type = other DNA
gaagaatctggagctgcatact

SEQ ID NO: 47434 - DNA, 22 bp, synthetic construct
  misc_feature 1..22: note = chemically synthesized
  source 1..22: mol_type = other DNA
gagctgcatactgtaatctatg

SEQ ID NO: 47435 - DNA, 22 bp, synthetic construct
  misc_feature 1..22: note = chemically synthesized
  source 1..22: mol_type = other DNA
catactgtaatctatgcagcaa

SEQ ID NO: 47436 - DNA, 22 bp, synthetic construct
  misc_feature 1..22: note = chemically synthesized
  source 1..22: mol_type = other DNA
taatctatgcagcaaaatatat

SEQ ID NO: 47437 - DNA, 22 bp, synthetic construct
  misc_feature 1..22: note = chemically synthesized
  source 1..22: mol_type = other DNA
tgcagcaaaatatatgaatatg

SEQ ID NO: 47438 - DNA, 22 bp, synthetic construct
  misc_feature 1..22: note = chemically synthesized
  source 1..22: mol_type = other DNA
acacaactaaattaaaaataat

SEQ ID NO: 47439 - DNA, 22 bp, synthetic construct
  misc_feature 1..22: note = chemically synthesized
  source 1..22: mol_type = other DNA
aattaaaaataatctcatgtca

SEQ ID NO: 47440 - DNA, 22 bp, synthetic construct
  misc_feature 1..22: note = chemically synthesized
  source 1..22: mol_type = other DNA
aaaataatctcatgtcagttca

SEQ ID NO: 47441 - DNA, 22 bp, synthetic construct
  misc_feature 1..22: note = chemically synthesized
  source 1..22: mol_type = other DNA
atgtcagttcacgtcaggtgct

SEQ ID NO: 47442 - DNA, 22 bp, synthetic construct
  misc_feature 1..22: note = chemically synthesized
  source 1..22: mol_type = other DNA
acgtcaggtgctaccatcaaat

SEQ ID NO: 47443 - DNA, 22 bp, synthetic construct
  misc_feature 1..22: note = chemically synthesized
  source 1..22: mol_type = other DNA
ccatcaaataaatcacaaaaaa

SEQ ID NO: 47444 - DNA, 22 bp, synthetic construct
  misc_feature 1..22: note = chemically synthesized
  source 1..22: mol_type = other DNA
ttggttttcgtaacattttaca

SEQ ID NO: 47445 - DNA, 22 bp, synthetic construct
  misc_feature 1..22: note = chemically synthesized
  source 1..22: mol_type = other DNA
tggttttcgtaacattttacat

SEQ ID NO: 47446 - DNA, 22 bp, synthetic construct
  misc_feature 1..22: note = chemically synthesized
  source 1..22: mol_type = other DNA
ggttttcgtaacattttacatt

SEQ ID NO: 47447 - DNA, 22 bp, synthetic construct
  misc_feature 1..22: note = chemically synthesized
  source 1..22: mol_type = other DNA
gttttcgtaacattttacattt

SEQ ID NO: 47448 - DNA, 22 bp, synthetic construct
  misc_feature 1..22: note = chemically synthesized
  source 1..22: mol_type = other DNA
tcgtaacattttacatttcaga

SEQ ID NO: 47449 - DNA, 22 bp, synthetic construct
  misc_feature 1..22: note = chemically synthesized
  source 1..22: mol_type = other DNA
cgtaacattttacatttcagac

SEQ ID NO: 47450 - DNA, 22 bp, synthetic construct
  misc_feature 1..22: note = chemically synthesized
  source 1..22: mol_type = other DNA
gtaacattttacatttcagacg

SEQ ID NO: 47451 - DNA, 22 bp, synthetic construct
  misc_feature 1..22: note = chemically synthesized
  source 1..22: mol_type = other DNA
tacatttcagacggtggataaa

SEQ ID NO: 47452 - DNA, 22 bp, synthetic construct
  misc_feature 1..22: note = chemically synthesized
  source 1..22: mol_type = other DNA
acatttcagacggtggataaag

SEQ ID NO: 47453 - DNA, 22 bp, synthetic construct
  misc_feature 1..22: note = chemically synthesized
  source 1..22: mol_type = other DNA
catttcagacggtggataaaga

SEQ ID NO: 47454 - DNA, 22 bp, synthetic construct
  misc_feature 1..22: note = chemically synthesized
  source 1..22: mol_type = other DNA
cagacggtggataaagaactgt

SEQ ID NO: 47455 - DNA, 22 bp, synthetic construct
  misc_feature 1..22: note = chemically synthesized
  source 1..22: mol_type = other DNA
agacggtggataaagaactgtg

SEQ ID NO: 47456 - DNA, 22 bp, synthetic construct
  misc_feature 1..22: note = chemically synthesized
  source 1..22: mol_type = other DNA
tggaggccaggcgtggtggctc

SEQ ID NO: 47457 - DNA, 22 bp, synthetic construct
  misc_feature 1..22: note = chemically synthesized
  source 1..22: mol_type = other DNA
acacctgtaattcgagcacttt

SEQ ID NO: 47458 - DNA, 22 bp, synthetic construct
  misc_feature 1..22: note = chemically synthesized
  source 1..22: mol_type = other DNA
taattcgagcactttgggaggc

SEQ ID NO: 47459 - DNA, 22 bp, synthetic construct
  misc_feature 1..22: note = chemically synthesized
  source 1..22: mol_type = other DNA
gagcactttgggaggctgaggc

SEQ ID NO: 47460 - DNA, 22 bp, synthetic construct
  misc_feature 1..22: note = chemically synthesized
  source 1..22: mol_type = other DNA
tgggaggctgaggcgggaggat

SEQ ID NO: 47461 - DNA, 22 bp, synthetic construct
  misc_feature 1..22: note = chemically synthesized
  source 1..22: mol_type = other DNA
gggaggctgaggcgggaggatc

SEQ ID NO: 47462 - DNA, 22 bp, synthetic construct
  misc_feature 1..22: note = chemically synthesized
  source 1..22: mol_type = other DNA
ggaggctgaggcgggaggatca

SEQ ID NO: 47463 - DNA, 22 bp, synthetic construct
  misc_feature 1..22: note = chemically synthesized
  source 1..22: mol_type = other DNA
aggcgggaggatcacctcctcg

SEQ ID NO: 47464 - DNA, 22 bp, synthetic construct
  misc_feature 1..22: note = chemically synthesized
  source 1..22: mol_type = other DNA
ctcggatccactgaggaggtca

SEQ ID NO: 47465 - DNA, 22 bp, synthetic construct
  misc_feature 1..22: note = chemically synthesized
  source 1..22: mol_type = other DNA
ggatccactgaggaggtcagga

SEQ ID NO: 47466 - DNA, 22 bp, synthetic construct
  misc_feature 1..22: note = chemically synthesized
  source 1..22: mol_type = other DNA
aggaggtcaggagtttgcgact

SEQ ID NO: 47467 - DNA, 22 bp, synthetic construct
  misc_feature 1..22: note = chemically synthesized
  source 1..22: mol_type = other DNA
gcgactagcctggccaacgtgg

SEQ ID NO: 47468 - DNA, 22 bp, synthetic construct
  misc_feature 1..22: note = chemically synthesized
  source 1..22: mol_type = other DNA
cgactagcctggccaacgtggt

SEQ ID NO: 47469 - DNA, 22 bp, synthetic construct
  misc_feature 1..22: note = chemically synthesized
  source 1..22: mol_type = other DNA
gcctggccaacgtggtgaaacc

SEQ ID NO: 47470 - DNA, 22 bp, synthetic construct
  misc_feature 1..22: note = chemically synthesized
  source 1..22: mol_type = other DNA
gccaacgtggtgaaaccccttc

SEQ ID NO: 47471 - DNA, 22 bp, synthetic construct
  misc_feature 1..22: note = chemically synthesized
  source 1..22: mol_type = other DNA
ctctactaaaaatacaaaaatt

SEQ ID NO: 47472 - DNA, 22 bp, synthetic construct
  misc_feature 1..22: note = chemically synthesized
  source 1..22: mol_type = other DNA
tctactaaaaatacaaaaatta

SEQ ID NO: 47473 - DNA, 22 bp, synthetic construct
  misc_feature 1..22: note = chemically synthesized
  source 1..22: mol_type = other DNA
tactaaaaatacaaaaattagc

SEQ ID NO: 47474 - DNA, 22 bp, synthetic construct
  misc_feature 1..22: note = chemically synthesized
  source 1..22: mol_type = other DNA
ctaaaaatacaaaaattagccg

SEQ ID NO: 47475 - DNA, 22 bp, synthetic construct
  misc_feature 1..22: note = chemically synthesized
  source 1..22: mol_type = other DNA
aaaatacaaaaattagccgggc

SEQ ID NO: 47476 - DNA, 22 bp, synthetic construct
  misc_feature 1..22: note = chemically synthesized
  source 1..22: mol_type = other DNA
gccgggcgtggtggcaggtacc

SEQ ID NO: 47477 - DNA, 22 bp, synthetic construct
  misc_feature 1..22: note = chemically synthesized
  source 1..22: mol_type = other DNA
taatcccagcttcttgggaggc

SEQ ID NO: 47478 - DNA, 22 bp, synthetic construct
  misc_feature 1..22: note = chemically synthesized
  source 1..22: mol_type = other DNA
cttgggaggctgaggcaggaga

SEQ ID NO: 47479 - DNA, 22 bp, synthetic construct
  misc_feature 1..22: note = chemically synthesized
  source 1..22: mol_type = other DNA
ttgggaggctgaggcaggagaa

SEQ ID NO: 47480 - DNA, 22 bp, synthetic construct
  misc_feature 1..22: note = chemically synthesized
  source 1..22: mol_type = other DNA
gggaggctgaggcaggagaacc

SEQ ID NO: 47481 - DNA, 22 bp, synthetic construct
  misc_feature 1..22: note = chemically synthesized
  source 1..22: mol_type = other DNA
ggaggctgaggcaggagaacca

SEQ ID NO: 47482 - DNA, 22 bp, synthetic construct
  misc_feature 1..22: note = chemically synthesized
  source 1..22: mol_type = other DNA
aggcaggagaaccacttgaacc

SEQ ID NO: 47483 - DNA, 22 bp, synthetic construct
  misc_feature 1..22: note = chemically synthesized
  source 1..22: mol_type = other DNA
gaacccgggagacagatgttgc

SEQ ID NO: 47484 - DNA, 22 bp, synthetic construct
  misc_feature 1..22: note = chemically synthesized
  source 1..22: mol_type = other DNA
aacccgggagacagatgttgca

SEQ ID NO: 47485 - DNA, 22 bp, synthetic construct
  misc_feature 1..22: note = chemically synthesized
  source 1..22: mol_type = other DNA
cagtgagctgagactgcaccat

SEQ ID NO: 47486 - DNA, 22 bp, synthetic construct
  misc_feature 1..22: note = chemically synthesized
  source 1..22: mol_type = other DNA
agactgcaccattgcactccag

SEQ ID NO: 47487 - DNA, 22 bp, synthetic construct
  misc_feature 1..22: note = chemically synthesized
  source 1..22: mol_type = other DNA
caccattgcactccagcctggg

SEQ ID NO: 47488 - DNA, 22 bp, synthetic construct
  misc_feature 1..22: note = chemically synthesized
  source 1..22: mol_type = other DNA
cactccagcctgggcaacaaga

SEQ ID NO: 47489 - DNA, 22 bp, synthetic construct
  misc_feature 1..22: note = chemically synthesized
  source 1..22: mol_type = other DNA
cagcctgggcaacaagagcgaa

SEQ ID NO: 47490 - DNA, 22 bp, synthetic construct
  misc_feature 1..22: note = chemically synthesized
  source 1..22: mol_type = other DNA
ggcaacaagagcgaaactccat

SEQ ID NO: 47491 - DNA, 22 bp, synthetic construct
  misc_feature 1..22: note = chemically synthesized
  source 1..22: mol_type = other DNA
catctcaaaaaaaaaagaaaaa

SEQ ID NO: 47492 - DNA, 22 bp, synthetic construct
  misc_feature 1..22: note = chemically synthesized
  source 1..22: mol_type = other DNA
aaaaaaaaaagaaaaagaactg

SEQ ID NO: 47493 - DNA, 22 bp, synthetic construct
  misc_feature 1..22: note = chemically synthesized
  source 1..22: mol_type = other DNA
tggacatgtgctccttatcttc

SEQ ID NO: 47494 - DNA, 22 bp, synthetic construct
  misc_feature 1..22: note = chemically synthesized
  source 1..22: mol_type = other DNA
cttatcttccacctctggtttt

SEQ ID NO: 47495 - DNA, 22 bp, synthetic construct
  misc_feature 1..22: note = chemically synthesized
  source 1..22: mol_type = other DNA
atcttccacctctggttttccc

SEQ ID NO: 47496 - DNA, 22 bp, synthetic construct
  misc_feature 1..22: note = chemically synthesized
  source 1..22: mol_type = other DNA
tcttccacctctggttttccca

SEQ ID NO: 47497 - DNA, 22 bp, synthetic construct
  misc_feature 1..22: note = chemically synthesized
  source 1..22: mol_type = other DNA
ccacctctggttttcccagctc

SEQ ID NO: 47498 - DNA, 22 bp, synthetic construct
  misc_feature 1..22: note = chemically synthesized
  source 1..22: mol_type = other DNA
cacctctggttttcccagctct

SEQ ID NO: 47499 - DNA, 22 bp, synthetic construct
  misc_feature 1..22: note = chemically synthesized
  source 1..22: mol_type = other DNA
tggttttcccagctctgtatct

SEQ ID NO: 47500 - DNA, 22 bp, synthetic construct
  misc_feature 1..22: note = chemically synthesized
  source 1..22: mol_type = other DNA
gttttcccagctctgtatcttt

SEQ ID NO: 47501 - DNA, 22 bp, synthetic construct
  misc_feature 1..22: note = chemically synthesized
  source 1..22: mol_type = other DNA
tcccagctctgtatctttgttc

SEQ ID NO: 47502 - DNA, 22 bp, synthetic construct
  misc_feature 1..22: note = chemically synthesized
  source 1..22: mol_type = other DNA
cccagctctgtatctttgttca

SEQ ID NO: 47503 - DNA, 22 bp, synthetic construct
  misc_feature 1..22: note = chemically synthesized
  source 1..22: mol_type = other DNA
ccagctctgtatctttgttcat

SEQ ID NO: 47504 - DNA, 22 bp, synthetic construct
  misc_feature 1..22: note = chemically synthesized
  source 1..22: mol_type = other DNA
tgtatctttgttcatggtacct

SEQ ID NO: 47505 - DNA, 22 bp, synthetic construct
  misc_feature 1..22: note = chemically synthesized
  source 1..22: mol_type = other DNA
tatctttgttcatggtacctcc

SEQ ID NO: 47506 - DNA, 22 bp, synthetic construct
  misc_feature 1..22: note = chemically synthesized
  source 1..22: mol_type = other DNA
tgttcatggtacctcctaatcc

SEQ ID NO: 47507 - DNA, 22 bp, synthetic construct
  misc_feature 1..22: note = chemically synthesized
  source 1..22: mol_type = other DNA
gttcatggtacctcctaatcct

SEQ ID NO: 47508 - DNA, 22 bp, synthetic construct
  misc_feature 1..22: note = chemically synthesized
  source 1..22: mol_type = other DNA
ttcatggtacctcctaatccta

SEQ ID NO: 47509 - DNA, 22 bp, synthetic construct
  misc_feature 1..22: note = chemically synthesized
  source 1..22: mol_type = other DNA
atggtacctcctaatcctagaa

SEQ ID NO: 47510 - DNA, 22 bp, synthetic construct
  misc_feature 1..22: note = chemically synthesized
  source 1..22: mol_type = other DNA
ctaatcctagaataaaattctc

SEQ ID NO: 47511 - DNA, 22 bp, synthetic construct
  misc_feature 1..22: note = chemically synthesized
  source 1..22: mol_type = other DNA
atcctagaataaaattctcatg

SEQ ID NO: 47512 - DNA, 22 bp, synthetic construct
  misc_feature 1..22: note = chemically synthesized
  source 1..22: mol_type = other DNA
gaataaaattctcatgacacca

SEQ ID NO: 47513 - DNA, 22 bp, synthetic construct
  misc_feature 1..22: note = chemically synthesized
  source 1..22: mol_type = other DNA
tcatgacaccatcatcgctgaa

SEQ ID NO: 47514 - DNA, 22 bp, synthetic construct
  misc_feature 1..22: note = chemically synthesized
  source 1..22: mol_type = other DNA
atgacaccatcatcgctgaact

SEQ ID NO: 47515 - DNA, 22 bp, synthetic construct
  misc_feature 1..22: note = chemically synthesized
  source 1..22: mol_type = other DNA
aactcctactaatgcttcaaag

SEQ ID NO: 47516 - DNA, 22 bp, synthetic construct
  misc_feature 1..22: note = chemically synthesized
  source 1..22: mol_type = other DNA
ctactaatgcttcaaagaccca

SEQ ID NO: 47517 - DNA, 22 bp, synthetic construct
  misc_feature 1..22: note = chemically synthesized
  source 1..22: mol_type = other DNA
ctaatgcttcaaagacccatct

SEQ ID NO: 47518 - DNA, 22 bp, synthetic construct
  misc_feature 1..22: note = chemically synthesized
  source 1..22: mol_type = other DNA
atgcttcaaagacccatctgaa

SEQ ID NO: 47519 - DNA, 22 bp, synthetic construct
  misc_feature 1..22: note = chemically synthesized
  source 1..22: mol_type = other DNA
caaagacccatctgaaaatgcc

SEQ ID NO: 47520 - DNA, 22 bp, synthetic construct
  misc_feature 1..22: note = chemically synthesized
  source 1..22: mol_type = other DNA
aaagacccatctgaaaatgcct

SEQ ID NO: 47521 - DNA, 22 bp, synthetic construct
  misc_feature 1..22: note = chemically synthesized
  source 1..22: mol_type = other DNA
aaaatgccttccgctaaataaa

SEQ ID NO: 47522 - DNA, 22 bp, synthetic construct
  misc_feature 1..22: note = chemically synthesized
  source 1..22: mol_type = other DNA
ccgctaaataaaaattgaatga

SEQ ID NO: 47523 - DNA, 22 bp, synthetic construct
  misc_feature 1..22: note = chemically synthesized
  source 1..22: mol_type = other DNA
cgctaaataaaaattgaatgaa

SEQ ID NO: 47524 - DNA, 22 bp, synthetic construct
  misc_feature 1..22: note = chemically synthesized
  source 1..22: mol_type = other DNA
aataaaaattgaatgaattggg

SEQ ID NO: 47525 - DNA, 22 bp, synthetic construct
  misc_feature 1..22: note = chemically synthesized
  source 1..22: mol_type = other DNA
aatgaattgggagagtactctg

SEQ ID NO: 47526 - DNA, 22 bp, synthetic construct
  misc_feature 1..22: note = chemically synthesized
  source 1..22: mol_type = other DNA
ggagagtactctgtgcagtgga

SEQ ID NO: 47527 - DNA, 22 bp, synthetic construct
  misc_feature 1..22: note = chemically synthesized
  source 1..22: mol_type = other DNA
tgtgcagtggagtgtcagttct

SEQ ID NO: 47528 - DNA, 22 bp, synthetic construct
  misc_feature 1..22: note = chemically synthesized
  source 1..22: mol_type = other DNA
tgcagtggagtgtcagttctgg

SEQ ID NO: 47529 - DNA, 22 bp, synthetic construct
  misc_feature 1..22: note = chemically synthesized
  source 1..22: mol_type = other DNA
tggaaacccagttctaatgcac

SEQ ID NO: 47530 - DNA, 22 bp, synthetic construct
  misc_feature 1..22: note = chemically synthesized
  source 1..22: mol_type = other DNA
gaaacccagttctaatgcacct

SEQ ID NO: 47531 - DNA, 22 bp, synthetic construct
  misc_feature 1..22: note = chemically synthesized
  source 1..22: mol_type = other DNA
taatgcacctggggtgacctcc

SEQ ID NO: 47532 - DNA, 22 bp, synthetic construct
  misc_feature 1..22: note = chemically synthesized
  source 1..22: mol_type = other DNA
atgcacctggggtgacctcctc

SEQ ID NO: 47533 - DNA, 22 bp, synthetic construct
  misc_feature 1..22: note = chemically synthesized
  source 1..22: mol_type = other DNA
gggtgacctcctctctctgggc

SEQ ID NO: 47534 - DNA, 22 bp, synthetic construct
  misc_feature 1..22: note = chemically synthesized
  source 1..22: mol_type = other DNA
ctctctctgggcctcagtttct

SEQ ID NO: 47535 - DNA, 22 bp, synthetic construct
  misc_feature 1..22: note = chemically synthesized
  source 1..22: mol_type = other DNA
tctctgggcctcagtttctcat

SEQ ID NO: 47536 - DNA, 22 bp, synthetic construct
  misc_feature 1..22: note = chemically synthesized
  source 1..22: mol_type = other DNA
tctgggcctcagtttctcatga

SEQ ID NO: 47537 - DNA, 22 bp, synthetic construct
  misc_feature 1..22: note = chemically synthesized
  source 1..22: mol_type = other DNA
tgggcctcagtttctcatgact

SEQ ID NO: 47538 - DNA, 22 bp, synthetic construct
  misc_feature 1..22: note = chemically synthesized
  source 1..22: mol_type = other DNA
ggcctcagtttctcatgactaa

SEQ ID NO: 47539 - DNA, 22 bp, synthetic construct
  misc_feature 1..22: note = chemically synthesized
  source 1..22: mol_type = other DNA
agtttctcatgactaaaagaaa

SEQ ID NO: 47540 - DNA, 22 bp, synthetic construct
  misc_feature 1..22: note = chemically synthesized
  source 1..22: mol_type = other DNA
ctcatgactaaaagaaaaggat

SEQ ID NO: 47541 - DNA, 22 bp, synthetic construct
  misc_feature 1..22: note = chemically synthesized
  source 1..22: mol_type = other DNA
tcatgactaaaagaaaaggatt

SEQ ID NO: 47542 - DNA, 22 bp, synthetic construct
  misc_feature 1..22: note = chemically synthesized
  source 1..22: mol_type = other DNA
atgactaaaagaaaaggattgg

SEQ ID NO: 47543 - DNA, 22 bp, synthetic construct
  misc_feature 1..22: note = chemically synthesized
  source 1..22: mol_type = other DNA
aaagaaaaggattggtctaaaa

SEQ ID NO: 47544 - DNA, 22 bp, synthetic construct
  misc_feature 1..22: note = chemically synthesized
  source 1..22: mol_type = other DNA
gtctaaaaattattttctgctt

SEQ ID NO: 47545 - DNA, 22 bp, synthetic construct
  misc_feature 1..22: note = chemically synthesized
  source 1..22: mol_type = other DNA
aaaattattttctgcttgccaa

SEQ ID NO: 47546 - DNA, 22 bp, synthetic construct
  misc_feature 1..22: note = chemically synthesized
  source 1..22: mol_type = other DNA
ttttctgcttgccaaaaaatat

SEQ ID NO: 47547 - DNA, 22 bp, synthetic construct
  misc_feature 1..22: note = chemically synthesized
  source 1..22: mol_type = other DNA
tctgcttgccaaaaaatatttt

SEQ ID NO: 47548 - DNA, 22 bp, synthetic construct
  misc_feature 1..22: note = chemically synthesized
  source 1..22: mol_type = other DNA
ctgcttgccaaaaaatattttc

SEQ ID NO: 47549 - DNA, 22 bp, synthetic construct
  misc_feature 1..22: note = chemically synthesized
  source 1..22: mol_type = other DNA
tgcttgccaaaaaatattttca

SEQ ID NO: 47550 - DNA, 22 bp, synthetic construct
  misc_feature 1..22: note = chemically synthesized
  source 1..22: mol_type = other DNA
cttgccaaaaaatattttcatt

SEQ ID NO: 47551 - DNA, 22 bp, synthetic construct
  misc_feature 1..22: note = chemically synthesized
  source 1..22: mol_type = other DNA
gccaaaaaatattttcattcta

SEQ ID NO: 47552 - DNA, 22 bp, synthetic construct
  misc_feature 1..22: note = chemically synthesized
  source 1..22: mol_type = other DNA
ccaaaaaatattttcattctaa

SEQ ID NO: 47553 - DNA, 22 bp, synthetic construct
  misc_feature 1..22: note = chemically synthesized
  source 1..22: mol_type = other DNA
tcattctaaattcgattcccac

SEQ ID NO: 47554 - DNA, 22 bp, synthetic construct
  misc_feature 1..22: note = chemically synthesized
  source 1..22: mol_type = other DNA
cattctaaattcgattcccaca

SEQ ID NO: 47555 - DNA, 22 bp, synthetic construct
  misc_feature 1..22: note = chemically synthesized
  source 1..22: mol_type = other DNA
attctaaattcgattcccacaa

SEQ ID NO: 47556 - DNA, 22 bp, synthetic construct
  misc_feature 1..22: note = chemically synthesized
  source 1..22: mol_type = other DNA
taaattcgattcccacaaaata

SEQ ID NO: 47557 - DNA, 22 bp, synthetic construct
  misc_feature 1..22: note = chemically synthesized
  source 1..22: mol_type = other DNA
aattcgattcccacaaaataac

SEQ ID NO: 47558 - DNA, 22 bp, synthetic construct
  misc_feature 1..22: note = chemically synthesized
  source 1..22: mol_type = other DNA
gattcccacaaaataaccattg

SEQ ID NO: 47559 - DNA, 22 bp, synthetic construct
  misc_feature 1..22: note = chemically synthesized
  source 1..22: mol_type = other DNA
ccacaaaataaccattgaatga

SEQ ID NO: 47560 - DNA, 22 bp, synthetic construct
  misc_feature 1..22: note = chemically synthesized
  source 1..22: mol_type = other DNA
aatgaatgaataaatgaacttg

SEQ ID NO: 47561 - DNA, 22 bp, synthetic construct
  misc_feature 1..22: note = chemically synthesized
  source 1..22: mol_type = other DNA
gaggaggctcctgttccaaact

SEQ ID NO: 47562 - DNA, 22 bp, synthetic construct
  misc_feature 1..22: note = chemically synthesized
  source 1..22: mol_type = other DNA
aggaggctcctgttccaaactt

SEQ ID NO: 47563 - DNA, 22 bp, synthetic construct
  misc_feature 1..22: note = chemically synthesized
  source 1..22: mol_type = other DNA
ctgttccaaacttccaccagag

SEQ ID NO: 47564 - DNA, 22 bp, synthetic construct
  misc_feature 1..22: note = chemically synthesized
  source 1..22: mol_type = other DNA
ttccaaacttccaccagagaag

SEQ ID NO: 47565 - DNA, 22 bp, synthetic construct
  misc_feature 1..22: note = chemically synthesized
  source 1..22: mol_type = other DNA
caaacttccaccagagaagaaa

SEQ ID NO: 47566 - DNA, 22 bp, synthetic construct
  misc_feature 1..22: note = chemically synthesized
  source 1..22: mol_type = other DNA
ccaccagagaagaaacatcctc

SEQ ID NO: 47567 - DNA, 22 bp, synthetic construct
  misc_feature 1..22: note = chemically synthesized
  source 1..22: mol_type = other DNA
caccagagaagaaacatcctca

SEQ ID NO: 47568 - DNA, 22 bp, synthetic construct
  misc_feature 1..22: note = chemically synthesized
  source 1..22: mol_type = other DNA
aagggcttggttcaggtggtca

SEQ ID NO: 47569 - DNA, 22 bp, synthetic construct
  misc_feature 1..22: note = chemically synthesized
  source 1..22: mol_type = other DNA
ggttcaggtggtcatacagcct

SEQ ID NO: 47570 - DNA, 22 bp, synthetic construct
  misc_feature 1..22: note = chemically synthesized
  source 1..22: mol_type = other DNA
gttcaggtggtcatacagcctc

SEQ ID NO: 47571 - DNA, 22 bp, synthetic construct
  misc_feature 1..22: note = chemically synthesized
  source 1..22: mol_type = other DNA
aggtggtcatacagcctctgct

SEQ ID NO: 47572 - DNA, 22 bp, synthetic construct
  misc_feature 1..22: note = chemically synthesized
  source 1..22: mol_type = other DNA
tgcttactcacctctcaggatg

SEQ ID NO: 47573 - DNA, 22 bp, synthetic construct
  misc_feature 1..22: note = chemically synthesized
  source 1..22: mol_type = other DNA
cttactcacctctcaggatggg

SEQ ID NO: 47574 - DNA, 22 bp, synthetic construct
  misc_feature 1..22: note = chemically synthesized
  source 1..22: mol_type = other DNA
actcacctctcaggatggggta

SEQ ID NO: 47575 - DNA, 22 bp, synthetic construct
  misc_feature 1..22: note = chemically synthesized
  source 1..22: mol_type = other DNA
ctcacctctcaggatggggtac

SEQ ID NO: 47576 - DNA, 22 bp, synthetic construct
  misc_feature 1..22: note = chemically synthesized
  source 1..22: mol_type = other DNA
acctctcaggatggggtactca

SEQ ID NO: 47577 - DNA, 22 bp, synthetic construct
  misc_feature 1..22: note = chemically synthesized
  source 1..22: mol_type = other DNA
tcaggatggggtactcactatt

SEQ ID NO: 47578 - DNA, 22 bp, synthetic construct
  misc_feature 1..22: note = chemically synthesized
  source 1..22: mol_type = other DNA
aggatggggtactcactatttc

SEQ ID NO: 47579 - DNA, 22 bp, synthetic construct
  misc_feature 1..22: note = chemically synthesized
  source 1..22: mol_type = other DNA
actatttccagaacagttgttt

SEQ ID NO: 47580 - DNA, 22 bp, synthetic construct
  misc_feature 1..22: note = chemically synthesized
  source 1..22: mol_type = other DNA
tttccagaacagttgttttgga

SEQ ID NO: 47581 - DNA, 22 bp, synthetic construct
  misc_feature 1..22: note = chemically synthesized
  source 1..22: mol_type = other DNA
ccagaacagttgttttggagca

SEQ ID NO: 47582 - DNA, 22 bp, synthetic construct
  misc_feature 1..22: note = chemically synthesized
  source 1..22: mol_type = other DNA
cagaacagttgttttggagcag

SEQ ID NO: 47583 - DNA, 22 bp, synthetic construct
  misc_feature 1..22: note = chemically synthesized
  source 1..22: mol_type = other DNA
ttttggagcagtggtaacttga

SEQ ID NO: 47584 - DNA, 22 bp, synthetic construct
  misc_feature 1..22: note = chemically synthesized
  source 1..22: mol_type = other DNA
tggagcagtggtaacttgaaat

SEQ ID NO: 47585 - DNA, 22 bp, synthetic construct
  misc_feature 1..22: note = chemically synthesized
  source 1..22: mol_type = other DNA
ggagcagtggtaacttgaaatg

SEQ ID NO: 47586 - DNA, 22 bp, synthetic construct
  misc_feature 1..22: note = chemically synthesized
  source 1..22: mol_type = other DNA
gagcagtggtaacttgaaatgc

SEQ ID NO: 47587 - DNA, 22 bp, synthetic construct
  misc_feature 1..22: note = chemically synthesized
  source 1..22: mol_type = other DNA
gaaatgccctttcttatcctgg

SEQ ID NO: 47588 - DNA, 22 bp, synthetic construct
  misc_feature 1..22: note = chemically synthesized
  source 1..22: mol_type = other DNA
aaatgccctttcttatcctggc

SEQ ID NO: 47589 - DNA, 22 bp, synthetic construct
  misc_feature 1..22: note = chemically synthesized
  source 1..22: mol_type = other DNA
tcttatcctggccacaacccca

SEQ ID NO: 47590 - DNA, 22 bp, synthetic construct
  misc_feature 1..22: note = chemically synthesized
  source 1..22: mol_type = other DNA
cttatcctggccacaaccccac

SEQ ID NO: 47591 - DNA, 22 bp, synthetic construct
  misc_feature 1..22: note = chemically synthesized
  source 1..22: mol_type = other DNA
ttatcctggccacaaccccaca

SEQ ID NO: 47592 - DNA, 22 bp, synthetic construct
  misc_feature 1..22: note = chemically synthesized
  source 1..22: mol_type = other DNA
atcctggccacaaccccacaac

SEQ ID NO: 47593 - DNA, 22 bp, synthetic construct
  misc_feature 1..22: note = chemically synthesized
  source 1..22: mol_type = other DNA
tcctggccacaaccccacaaca

SEQ ID NO: 47594 - DNA, 22 bp, synthetic construct
  misc_feature 1..22: note = chemically synthesized
  source 1..22: mol_type = other DNA
gccacaaccccacaacatccct

SEQ ID NO: 47595 - DNA, 22 bp, synthetic construct
  misc_feature 1..22: note = chemically synthesized
  source 1..22: mol_type = other DNA
gagaaagtcaaaggctcaggga

SEQ ID NO: 47596 - DNA, 22 bp, synthetic construct
  misc_feature 1..22: note = chemically synthesized
  source 1..22: mol_type = other DNA
agggaacaaggaagagggctat

SEQ ID NO: 47597 - DNA, 22 bp, synthetic construct
  misc_feature 1..22: note = chemically synthesized
  source 1..22: mol_type = other DNA
tactgagctgagtaaggacttg

SEQ ID NO: 47598 - DNA, 22 bp, synthetic construct
  misc_feature 1..22: note = chemically synthesized
  source 1..22: mol_type = other DNA
agctgagtaaggacttgccatc

SEQ ID NO: 47599 - DNA, 22 bp, synthetic construct
  misc_feature 1..22: note = chemically synthesized
  source 1..22: mol_type = other DNA
agtaaggacttgccatcctgcc

SEQ ID NO: 47600 - DNA, 22 bp, synthetic construct
  misc_feature 1..22: note = chemically synthesized
  source 1..22: mol_type = other DNA
gccatcctgccacccagcacac

SEQ ID NO: 47601 - DNA, 22 bp, synthetic construct
  misc_feature 1..22: note = chemically synthesized
  source 1..22: mol_type = other DNA
ccatcctgccacccagcacact

SEQ ID NO: 47602 - DNA, 22 bp, synthetic construct
  misc_feature 1..22: note = chemically synthesized
  source 1..22: mol_type = other DNA
ccacccagcacactcagacaga

SEQ ID NO: 47603 - DNA, 22 bp, synthetic construct
  misc_feature 1..22: note = chemically synthesized
  source 1..22: mol_type = other DNA
agacagaagcgtgggcaggcag

SEQ ID NO: 47604 - DNA, 22 bp, synthetic construct
  misc_feature 1..22: note = chemically synthesized
  source 1..22: mol_type = other DNA
tgagtggcagaattttcccctc

SEQ ID NO: 47605 - DNA, 22 bp, synthetic construct
  misc_feature 1..22: note = chemically synthesized
  source 1..22: mol_type = other DNA
tcccctctgccccaggagctgt

SEQ ID NO: 47606 - DNA, 22 bp, synthetic construct
  misc_feature 1..22: note = chemically synthesized
  source 1..22: mol_type = other DNA
cccctctgccccaggagctgtg

SEQ ID NO: 47607 - DNA, 22 bp, synthetic construct
  misc_feature 1..22: note = chemically synthesized
  source 1..22: mol_type = other DNA
ccctctgccccaggagctgtgg

SEQ ID NO: 47608 - DNA, 22 bp, synthetic construct
  misc_feature 1..22: note = chemically synthesized
  source 1..22: mol_type = other DNA
tgccccaggagctgtggtttgg

SEQ ID NO: 47609 - DNA, 22 bp, synthetic construct
  misc_feature 1..22: note = chemically synthesized
  source 1..22: mol_type = other DNA
ccccaggagctgtggtttggag

SEQ ID NO: 47610 - DNA, 22 bp, synthetic construct
  misc_feature 1..22: note = chemically synthesized
  source 1..22: mol_type = other DNA
tggtttggagcaaagacaatgt

SEQ ID NO: 47611 - DNA, 22 bp, synthetic construct
  misc_feature 1..22: note = chemically synthesized
  source 1..22: mol_type = other DNA
ggagcaaagacaatgtcaccaa

SEQ ID NO: 47612 - DNA, 22 bp, synthetic construct
  misc_feature 1..22: note = chemically synthesized
  source 1..22: mol_type = other DNA
gagcaaagacaatgtcaccaac

SEQ ID NO: 47613 - DNA, 22 bp, synthetic construct
  misc_feature 1..22: note = chemically synthesized
  source 1..22: mol_type = other DNA
cagacagggacaaaactgcaag

SEQ ID NO: 47614 - DNA, 22 bp, synthetic construct
  misc_feature 1..22: note = chemically synthesized
  source 1..22: mol_type = other DNA
caagtgatccccccggggcttg

SEQ ID NO: 47615 - DNA, 22 bp, synthetic construct
  misc_feature 1..22: note = chemically synthesized
  source 1..22: mol_type = other DNA
gcattgtaagttcactcatggt

SEQ ID NO: 47616 - DNA, 22 bp, synthetic construct
  misc_feature 1..22: note = chemically synthesized
  source 1..22: mol_type = other DNA
cattgtaagttcactcatggtc

SEQ ID NO: 47617 - DNA, 22 bp, synthetic construct
  misc_feature 1..22: note = chemically synthesized
  source 1..22: mol_type = other DNA
taagttcactcatggtcaacag

SEQ ID NO: 47618 - DNA, 22 bp, synthetic construct
  misc_feature 1..22: note = chemically synthesized
  source 1..22: mol_type = other DNA
actcatggtcaacagaactttc

SEQ ID NO: 47619 - DNA, 22 bp, synthetic construct
  misc_feature 1..22: note = chemically synthesized
  source 1..22: mol_type = other DNA
atggtcaacagaactttccctt

SEQ ID NO: 47620 - DNA, 22 bp, synthetic construct
  misc_feature 1..22: note = chemically synthesized
  source 1..22: mol_type = other DNA
tcccttcatctccccatctgct

SEQ ID NO: 47621 - DNA, 22 bp, synthetic construct
  misc_feature 1..22: note = chemically synthesized
  source 1..22: mol_type = other DNA
cccttcatctccccatctgctg

SEQ ID NO: 47622 - DNA, 22 bp, synthetic construct
  misc_feature 1..22: note = chemically synthesized
  source 1..22: mol_type = other DNA
ccttcatctccccatctgctgc

SEQ ID NO: 47623 - DNA, 22 bp, synthetic construct
  misc_feature 1..22: note = chemically synthesized
  source 1..22: mol_type = other DNA
catctccccatctgctgccact

SEQ ID NO: 47624 - DNA, 22 bp, synthetic construct
  misc_feature 1..22: note = chemically synthesized
  source 1..22: mol_type = other DNA
atctccccatctgctgccactg

SEQ ID NO: 47625 - DNA, 22 bp, synthetic construct
  misc_feature 1..22: note = chemically synthesized
  source 1..22: mol_type = other DNA
cccatctgctgccactgagccg

SEQ ID NO: 47626 - DNA, 22 bp, synthetic construct
  misc_feature 1..22: note = chemically synthesized
  source 1..22: mol_type = other DNA
ctgccactgagccgtagggacg

SEQ ID NO: 47627 - DNA, 22 bp, synthetic construct
  misc_feature 1..22: note = chemically synthesized
  source 1..22: mol_type = other DNA
ccactgagccgtagggacgatt

SEQ ID NO: 47628 - DNA, 22 bp, synthetic construct
  misc_feature 1..22: note = chemically synthesized
  source 1..22: mol_type = other DNA
agccgtagggacgattgtcacc

SEQ ID NO: 47629 - DNA, 22 bp, synthetic construct
  misc_feature 1..22: note = chemically synthesized
  source 1..22: mol_type = other DNA
tcacctcccttttaaagattag

SEQ ID NO: 47630 - DNA, 22 bp, synthetic construct
  misc_feature 1..22: note = chemically synthesized
  source 1..22: mol_type = other DNA
ccttttaaagattaggcaatgg

SEQ ID NO: 47631 - DNA, 22 bp, synthetic construct
  misc_feature 1..22: note = chemically synthesized
  source 1..22: mol_type = other DNA
ttaaagattaggcaatggaggc

SEQ ID NO: 47632 - DNA, 22 bp, synthetic construct
  misc_feature 1..22: note = chemically synthesized
  source 1..22: mol_type = other DNA
taaagattaggcaatggaggct

SEQ ID NO: 47633 - DNA, 22 bp, synthetic construct
  misc_feature 1..22: note = chemically synthesized
  source 1..22: mol_type = other DNA
aaagattaggcaatggaggctc

SEQ ID NO: 47634 - DNA, 22 bp, synthetic construct
  misc_feature 1..22: note = chemically synthesized
  source 1..22: mol_type = other DNA
aagattaggcaatggaggctca

SEQ ID NO: 47635 - DNA, 22 bp, synthetic construct
  misc_feature 1..22: note = chemically synthesized
  source 1..22: mol_type = other DNA
ggcaatggaggctcaaggataa

SEQ ID NO: 47636 - DNA, 22 bp, synthetic construct
  misc_feature 1..22: note = chemically synthesized
  source 1..22: mol_type = other DNA
aaggataagtgacttgtcaagc

SEQ ID NO: 47637 - DNA, 22 bp, synthetic construct
  misc_feature 1..22: note = chemically synthesized
  source 1..22: mol_type = other DNA
gtcaagcaccacagctagtgag

SEQ ID NO: 47638 - DNA, 22 bp, synthetic construct
  misc_feature 1..22: note = chemically synthesized
  source 1..22: mol_type = other DNA
tcaagcaccacagctagtgaga

SEQ ID NO: 47639 - DNA, 22 bp, synthetic construct
  misc_feature 1..22: note = chemically synthesized
  source 1..22: mol_type = other DNA
gtgagaggaagccaagattcaa

SEQ ID NO: 47640 - DNA, 22 bp, synthetic construct
  misc_feature 1..22: note = chemically synthesized
  source 1..22: mol_type = other DNA
aaccccacatctgactccaagc

SEQ ID NO: 47641 - DNA, 22 bp, synthetic construct
  misc_feature 1..22: note = chemically synthesized
  source 1..22: mol_type = other DNA
actccaagctgggggacacaga

SEQ ID NO: 47642 - DNA, 22 bp, synthetic construct
  misc_feature 1..22: note = chemically synthesized
  source 1..22: mol_type = other DNA
caagctgggggacacagaacct

SEQ ID NO: 47643 - DNA, 22 bp, synthetic construct
  misc_feature 1..22: note = chemically synthesized
  source 1..22: mol_type = other DNA
ggggacacagaacctcagccaa

SEQ ID NO: 47644 - DNA, 22 bp, synthetic construct
  misc_feature 1..22: note = chemically synthesized
  source 1..22: mol_type = other DNA
agccaagtcctgggctggtaat

SEQ ID NO: 47645 - DNA, 22 bp, synthetic construct
  misc_feature 1..22: note = chemically synthesized
  source 1..22: mol_type = other DNA
ggctggtaatacttagaaaaag

SEQ ID NO: 47646 - DNA, 22 bp, synthetic construct
  misc_feature 1..22: note = chemically synthesized
  source 1..22: mol_type = other DNA
gtaatacttagaaaaagctagt

SEQ ID NO: 47647 - DNA, 22 bp, synthetic construct
  misc_feature 1..22: note = chemically synthesized
  source 1..22: mol_type = other DNA
agaaaaagctagtggtctcgcc

SEQ ID NO: 47648 - DNA, 22 bp, synthetic construct
  misc_feature 1..22: note = chemically synthesized
  source 1..22: mol_type = other DNA
gaaaaagctagtggtctcgccc

SEQ ID NO: 47649 - DNA, 22 bp, synthetic construct
  misc_feature 1..22: note = chemically synthesized
  source 1..22: mol_type = other DNA
gtggtctcgccccgggaagaag

SEQ ID NO: 47650 - DNA, 22 bp, synthetic construct
  misc_feature 1..22: note = chemically synthesized
  source 1..22: mol_type = other DNA
gccccgggaagaagcttcccac

SEQ ID NO: 47651 - DNA, 22 bp, synthetic construct
  misc_feature 1..22: note = chemically synthesized
  source 1..22: mol_type = other DNA
cccacagcctgagggccagaag

SEQ ID NO: 47652 - DNA, 22 bp, synthetic construct
  misc_feature 1..22: note = chemically synthesized
  source 1..22: mol_type = other DNA
ccacagcctgagggccagaagc

SEQ ID NO: 47653 - DNA, 22 bp, synthetic construct
  misc_feature 1..22: note = chemically synthesized
  source 1..22: mol_type = other DNA
agggccagaagctggcagagtt

SEQ ID NO: 47654 - DNA, 22 bp, synthetic construct
  misc_feature 1..22: note = chemically synthesized
  source 1..22: mol_type = other DNA
gcagagttgttgagcaaactcg

SEQ ID NO: 47655 - DNA, 22 bp, synthetic construct
  misc_feature 1..22: note = chemically synthesized
  source 1..22: mol_type = other DNA
ttgagcaaactcgccccgcaca

SEQ ID NO: 47656 - DNA, 22 bp, synthetic construct
  misc_feature 1..22: note = chemically synthesized
  source 1..22: mol_type = other DNA
agcaaactcgccccgcacacgg

SEQ ID NO: 47657 - DNA, 22 bp, synthetic construct
  misc_feature 1..22: note = chemically synthesized
  source 1..22: mol_type = other DNA
gccccgcacacggtcggcagac

SEQ ID NO: 47658 - DNA, 22 bp, synthetic construct
  misc_feature 1..22: note = chemically synthesized
  source 1..22: mol_type = other DNA
aggcgccgggctcagctccggg

SEQ ID NO: 47659 - DNA, 22 bp, synthetic construct
  misc_feature 1..22: note = chemically synthesized
  source 1..22: mol_type = other DNA
agctccggggtcccagtaccag

SEQ ID NO: 47660 - DNA, 22 bp, synthetic construct
  misc_feature 1..22: note = chemically synthesized
  source 1..22: mol_type = other DNA
cggggtcccagtaccaggcgca

SEQ ID NO: 47661 - DNA, 22 bp, synthetic construct
  misc_feature 1..22: note = chemically synthesized
  source 1..22: mol_type = other DNA
cggctccagagcaccaagggcc

SEQ ID NO: 47662 - DNA, 22 bp, synthetic construct
  misc_feature 1..22: note = chemically synthesized
  source 1..22: mol_type = other DNA
cagagcaccaagggcccttccc

SEQ ID NO: 47663 - DNA, 22 bp, synthetic construct
  misc_feature 1..22: note = chemically synthesized
  source 1..22: mol_type = other DNA
ccctgcctgagtcctaaaggac

SEQ ID NO: 47664 - DNA, 22 bp, synthetic construct
  misc_feature 1..22: note = chemically synthesized
  source 1..22: mol_type = other DNA
cctgcctgagtcctaaaggacg

SEQ ID NO: 47665 - DNA, 22 bp, synthetic construct
  misc_feature 1..22: note = chemically synthesized
  source 1..22: mol_type = other DNA
cctgagtcctaaaggacgccaa

SEQ ID NO: 47666 - DNA, 22 bp, synthetic construct
  misc_feature 1..22: note = chemically synthesized
  source 1..22: mol_type = other DNA
agtcctaaaggacgccaatggg

SEQ ID NO: 47667 - DNA, 22 bp, synthetic construct
  misc_feature 1..22: note = chemically synthesized
  source 1..22: mol_type = other DNA
aaggacgccaatgggcctcgag

SEQ ID NO: 47668 - DNA, 22 bp, synthetic construct
  misc_feature 1..22: note = chemically synthesized
  source 1..22: mol_type = other DNA
gagaatacctccgccccttctc

SEQ ID NO: 47669 - DNA, 22 bp, synthetic construct
  misc_feature 1..22: note = chemically synthesized
  source 1..22: mol_type = other DNA
cgccccttctcccctgcccctt

SEQ ID NO: 47670 - DNA, 22 bp, synthetic construct
  misc_feature 1..22: note = chemically synthesized
  source 1..22: mol_type = other DNA
ctcccctgccccttcagctggt

SEQ ID NO: 47671 - DNA, 22 bp, synthetic construct
  misc_feature 1..22: note = chemically synthesized
  source 1..22: mol_type = other DNA
tcccctgccccttcagctggtt

SEQ ID NO: 47672 - DNA, 22 bp, synthetic construct
  misc_feature 1..22: note = chemically synthesized
  source 1..22: mol_type = other DNA
ccctgccccttcagctggttct

SEQ ID NO: 47673 - DNA, 22 bp, synthetic construct
  misc_feature 1..22: note = chemically synthesized
  source 1..22: mol_type = other DNA
ccccttcagctggttcttttct

SEQ ID NO: 47674 - DNA, 22 bp, synthetic construct
  misc_feature 1..22: note = chemically synthesized
  source 1..22: mol_type = other DNA
cagctggttcttttcttcggct

SEQ ID NO: 47675 - DNA, 22 bp, synthetic construct
  misc_feature 1..22: note = chemically synthesized
  source 1..22: mol_type = other DNA
agctggttcttttcttcggctg

SEQ ID NO: 47676 - DNA, 22 bp, synthetic construct
  misc_feature 1..22: note = chemically synthesized
  source 1..22: mol_type = other DNA
gttcttttcttcggctgaaaca

SEQ ID NO: 47677 - DNA, 22 bp, synthetic construct
  misc_feature 1..22: note = chemically synthesized
  source 1..22: mol_type = other DNA
ttttcttcggctgaaacagatg

SEQ ID NO: 47678 - DNA, 22 bp, synthetic construct
  misc_feature 1..22: note = chemically synthesized
  source 1..22: mol_type = other DNA
ttcttcggctgaaacagatgga

SEQ ID NO: 47679 - DNA, 22 bp, synthetic construct
  misc_feature 1..22: note = chemically synthesized
  source 1..22: mol_type = other DNA
tcttcggctgaaacagatggaa

SEQ ID NO: 47680 - DNA, 22 bp, synthetic construct
  misc_feature 1..22: note = chemically synthesized
  source 1..22: mol_type = other DNA
cttcggctgaaacagatggaat

SEQ ID NO: 47681 - DNA, 22 bp, synthetic construct
  misc_feature 1..22: note = chemically synthesized
  source 1..22: mol_type = other DNA
ttcggctgaaacagatggaata

SEQ ID NO: 47682 - DNA, 22 bp, synthetic construct
  misc_feature 1..22: note = chemically synthesized
  source 1..22: mol_type = other DNA
cggctgaaacagatggaatact

SEQ ID NO: 47683 - DNA, 22 bp, synthetic construct
  misc_feature 1..22: note = chemically synthesized
  source 1..22: mol_type = other DNA
ggctgaaacagatggaatacta

SEQ ID NO: 47684 - DNA, 22 bp, synthetic construct
  misc_feature 1..22: note = chemically synthesized
  source 1..22: mol_type = other DNA
aaacagatggaatactagagca

SEQ ID NO: 47685 - DNA, 22 bp, synthetic construct
  misc_feature 1..22: note = chemically synthesized
  source 1..22: mol_type = other DNA
gagcatgagttctgtgtcataa

SEQ ID NO: 47686 - DNA, 22 bp, synthetic construct
  misc_feature 1..22: note = chemically synthesized
  source 1..22: mol_type = other DNA
tgtgtcataaagaaattgcctc

SEQ ID NO: 47687 - DNA, 22 bp, synthetic construct
  misc_feature 1..22: note = chemically synthesized
  source 1..22: mol_type = other DNA
tgtcataaagaaattgcctcgt

SEQ ID NO: 47688 - DNA, 22 bp, synthetic construct
  misc_feature 1..22: note = chemically synthesized
  source 1..22: mol_type = other DNA
cctcgtgctcccagcatctgcc

SEQ ID NO: 47689 - DNA, 22 bp, synthetic construct
  misc_feature 1..22: note = chemically synthesized
  source 1..22: mol_type = other DNA
gtgctcccagcatctgccgtcc

SEQ ID NO: 47690 - DNA, 22 bp, synthetic construct
  misc_feature 1..22: note = chemically synthesized
  source 1..22: mol_type = other DNA
ccagcatctgccgtccttccca

SEQ ID NO: 47691 - DNA, 22 bp, synthetic construct
  misc_feature 1..22: note = chemically synthesized
  source 1..22: mol_type = other DNA
ccgtccttcccaccccgcccct

SEQ ID NO: 47692 - DNA, 22 bp, synthetic construct
  misc_feature 1..22: note = chemically synthesized
  source 1..22: mol_type = other DNA
cccaccccgcccctgtctcggg

SEQ ID NO: 47693 - DNA, 22 bp, synthetic construct
  misc_feature 1..22: note = chemically synthesized
  source 1..22: mol_type = other DNA
ccaccccgcccctgtctcgggt

SEQ ID NO: 47694 - DNA, 22 bp, synthetic construct
  misc_feature 1..22: note = chemically synthesized
  source 1..22: mol_type = other DNA
tctcgggtagggccttctctcc

SEQ ID NO: 47695 - DNA, 22 bp, synthetic construct
  misc_feature 1..22: note = chemically synthesized
  source 1..22: mol_type = other DNA
gggtagggccttctctccaggc

SEQ ID NO: 47696 - DNA, 22 bp, synthetic construct
  misc_feature 1..22: note = chemically synthesized
  source 1..22: mol_type = other DNA
ctctccaggccctccaccctcc

SEQ ID NO: 47697 - DNA, 22 bp, synthetic construct
  misc_feature 1..22: note = chemically synthesized
  source 1..22: mol_type = other DNA
tctccaggccctccaccctccg

SEQ ID NO: 47698 - DNA, 22 bp, synthetic construct
  misc_feature 1..22: note = chemically synthesized
  source 1..22: mol_type = other DNA
tccaggccctccaccctccgct

SEQ ID NO: 47699 - DNA, 22 bp, synthetic construct
  misc_feature 1..22: note = chemically synthesized
  source 1..22: mol_type = other DNA
caggccctccaccctccgctgc

SEQ ID NO: 47700 - DNA, 22 bp, synthetic construct
  misc_feature 1..22: note = chemically synthesized
  source 1..22: mol_type = other DNA
caccctccgctgcccatgtttt

SEQ ID NO: 47701 - DNA, 22 bp, synthetic construct
  misc_feature 1..22: note = chemically synthesized
  source 1..22: mol_type = other DNA
cgctgcccatgttttccaaacc

SEQ ID NO: 47702 - DNA, 22 bp, synthetic construct
  misc_feature 1..22: note = chemically synthesized
  source 1..22: mol_type = other DNA
cccatgttttccaaaccaaatc

SEQ ID NO: 47703 - DNA, 22 bp, synthetic construct
  misc_feature 1..22: note = chemically synthesized
  source 1..22: mol_type = other DNA
tccaaaccaaatcggaacccac

SEQ ID NO: 47704 - DNA, 22 bp, synthetic construct
  misc_feature 1..22: note = chemically synthesized
  source 1..22: mol_type = other DNA
ccaaaccaaatcggaacccact

SEQ ID NO: 47705 - DNA, 22 bp, synthetic construct
  misc_feature 1..22: note = chemically synthesized
  source 1..22: mol_type = other DNA
caaaccaaatcggaacccacta

SEQ ID NO: 47706 - DNA, 22 bp, synthetic construct
  misc_feature 1..22: note = chemically synthesized
  source 1..22: mol_type = other DNA
taatggcaagcccgctttctct

SEQ ID NO: 47707 - DNA, 22 bp, synthetic construct
  misc_feature 1..22: note = chemically synthesized
  source 1..22: mol_type = other DNA
tctctgtgcctggtgcagttcc

SEQ ID NO: 47708 - DNA, 22 bp, synthetic construct
  misc_feature 1..22: note = chemically synthesized
  source 1..22: mol_type = other DNA
ctctgtgcctggtgcagttccc

SEQ ID NO: 47709 - DNA, 22 bp, synthetic construct
  misc_feature 1..22: note = chemically synthesized
  source 1..22: mol_type = other DNA
tctgtgcctggtgcagttccca

SEQ ID NO: 47710 - DNA, 22 bp, synthetic construct
  misc_feature 1..22: note = chemically synthesized
  source 1..22: mol_type = other DNA
tgtgcctggtgcagttcccagt

SEQ ID NO: 47711 - DNA, 22 bp, synthetic construct
  misc_feature 1..22: note = chemically synthesized
  source 1..22: mol_type = other DNA
tgcctggtgcagttcccagtac

SEQ ID NO: 47712 - DNA, 22 bp, synthetic construct
  misc_feature 1..22: note = chemically synthesized
  source 1..22: mol_type = other DNA
gtgcagttcccagtacgttcca

SEQ ID NO: 47713 - DNA, 22 bp, synthetic construct
  misc_feature 1..22: note = chemically synthesized
  source 1..22: mol_type = other DNA
ccagtacgttccaggcattcac

SEQ ID NO: 47714 - DNA, 22 bp, synthetic construct
  misc_feature 1..22: note = chemically synthesized
  source 1..22: mol_type = other DNA
caggcattcactccttcaccca

SEQ ID NO: 47715 - DNA, 22 bp, synthetic construct
  misc_feature 1..22: note = chemically synthesized
  source 1..22: mol_type = other DNA
actccttcacccacctgtgccg

SEQ ID NO: 47716 - DNA, 22 bp, synthetic construct
  misc_feature 1..22: note = chemically synthesized
  source 1..22: mol_type = other DNA
cttcacccacctgtgccgcggc

SEQ ID NO: 47717 - DNA, 22 bp, synthetic construct
  misc_feature 1..22: note = chemically synthesized
  source 1..22: mol_type = other DNA
cacccacctgtgccgcggcgag

SEQ ID NO: 47718 - DNA, 22 bp, synthetic construct
  misc_feature 1..22: note = chemically synthesized
  source 1..22: mol_type = other DNA
acccacctgtgccgcggcgagg

SEQ ID NO: 47719 - DNA, 22 bp, synthetic construct
  misc_feature 1..22: note = chemically synthesized
  source 1..22: mol_type = other DNA
tgccgcggcgaggcagaaactg

SEQ ID NO: 47720 - DNA, 22 bp, synthetic construct
  misc_feature 1..22: note = chemically synthesized
  source 1..22: mol_type = other DNA
ggaaatctgggcaggatatcct

SEQ ID NO: 47721 - DNA, 22 bp, synthetic construct
  misc_feature 1..22: note = chemically synthesized
  source 1..22: mol_type = other DNA
ggcaggatatcctggcagtgct

SEQ ID NO: 47722 - DNA, 22 bp, synthetic construct
  misc_feature 1..22: note = chemically synthesized
  source 1..22: mol_type = other DNA
gcagtgctctgctcgcccttcc

SEQ ID NO: 47723 - DNA, 22 bp, synthetic construct
  misc_feature 1..22: note = chemically synthesized
  source 1..22: mol_type = other DNA
tgctcgcccttcctcggcctcc

SEQ ID NO: 47724 - DNA, 22 bp, synthetic construct
  misc_feature 1..22: note = chemically synthesized
  source 1..22: mol_type = other DNA
ctcgcccttcctcggcctccgg

SEQ ID NO: 47725 - DNA, 22 bp, synthetic construct
  misc_feature 1..22: note = chemically synthesized
  source 1..22: mol_type = other DNA
gcccttcctcggcctccgggtc

SEQ ID NO: 47726 - DNA, 22 bp, synthetic construct
  misc_feature 1..22: note = chemically synthesized
  source 1..22: mol_type = other DNA
cctcggcctccgggtctcccaa

SEQ ID NO: 47727 - DNA, 22 bp, synthetic construct
  misc_feature 1..22: note = chemically synthesized
  source 1..22: mol_type = other DNA
ctcggcctccgggtctcccaac

SEQ ID NO: 47728 - DNA, 22 bp, synthetic construct
  misc_feature 1..22: note = chemically synthesized
  source 1..22: mol_type = other DNA
ggcctccgggtctcccaacccc

SEQ ID NO: 47729 - DNA, 22 bp, synthetic construct
  misc_feature 1..22: note = chemically synthesized
  source 1..22: mol_type = other DNA
cgggtctcccaaccccgcgaac

SEQ ID NO: 47730 - DNA, 22 bp, synthetic construct
  misc_feature 1..22: note = chemically synthesized
  source 1..22: mol_type = other DNA
ccaaccccgcgaaccttcccac

SEQ ID NO: 47731 - DNA, 22 bp, synthetic construct
  misc_feature 1..22: note = chemically synthesized
  source 1..22: mol_type = other DNA
cccactgaatagcgcagccgca

SEQ ID NO: 47732 - DNA, 22 bp, synthetic construct
  misc_feature 1..22: note = chemically synthesized
  source 1..22: mol_type = other DNA
ccactgaatagcgcagccgcac

SEQ ID NO: 47733 - DNA, 22 bp, synthetic construct
  misc_feature 1..22: note = chemically synthesized
  source 1..22: mol_type = other DNA
aatagcgcagccgcacgcccca

SEQ ID NO: 47734 - DNA, 22 bp, synthetic construct
  misc_feature 1..22: note = chemically synthesized
  source 1..22: mol_type = other DNA
tccaccgtgctccccactaccc

SEQ ID NO: 47735 - DNA, 22 bp, synthetic construct
  misc_feature 1..22: note = chemically synthesized
  source 1..22: mol_type = other DNA
caccgtgctccccactacccgt

SEQ ID NO: 47736 - DNA, 22 bp, synthetic construct
  misc_feature 1..22: note = chemically synthesized
  source 1..22: mol_type = other DNA
cccactacccgtcctcccccgc

SEQ ID NO: 47737 - DNA, 22 bp, synthetic construct
  misc_feature 1..22: note = chemically synthesized
  source 1..22: mol_type = other DNA
cccgtcctcccccgccgccttg

SEQ ID NO: 47738 - DNA, 22 bp, synthetic construct
  misc_feature 1..22: note = chemically synthesized
  source 1..22: mol_type = other DNA
ccccgccgccttgcctgcagtc

SEQ ID NO: 47739 - DNA, 22 bp, synthetic construct
  misc_feature 1..22: note = chemically synthesized
  source 1..22: mol_type = other DNA
gcctgcagtccccaagatcgtg

SEQ ID NO: 47740 - DNA, 22 bp, synthetic construct
  misc_feature 1..22: note = chemically synthesized
  source 1..22: mol_type = other DNA
cctgcagtccccaagatcgtgc

SEQ ID NO: 47741 - DNA, 22 bp, synthetic construct
  misc_feature 1..22: note = chemically synthesized
  source 1..22: mol_type = other DNA
cagtccccaagatcgtgccaag

SEQ ID NO: 47742 - DNA, 22 bp, synthetic construct
  misc_feature 1..22: note = chemically synthesized
  source 1..22: mol_type = other DNA
ggcgacctgcactccacttcct

SEQ ID NO: 47743 - DNA, 22 bp, synthetic construct
  misc_feature 1..22: note = chemically synthesized
  source 1..22: mol_type = other DNA
cactccacttcctctcttacat

SEQ ID NO: 47744 - DNA, 22 bp, synthetic construct
  misc_feature 1..22: note = chemically synthesized
  source 1..22: mol_type = other DNA
cacttcctctcttacatggggg

SEQ ID NO: 47745 - DNA, 22 bp, synthetic construct
  misc_feature 1..22: note = chemically synthesized
  source 1..22: mol_type = other DNA
cctctcttacatggggggaaac

SEQ ID NO: 47746 - DNA, 22 bp, synthetic construct
  misc_feature 1..22: note = chemically synthesized
  source 1..22: mol_type = other DNA
ctctcttacatggggggaaact

SEQ ID NO: 47747 - DNA, 22 bp, synthetic construct
  misc_feature 1..22: note = chemically synthesized
  source 1..22: mol_type = other DNA
tcttacatggggggaaactgag

SEQ ID NO: 47748 - DNA, 22 bp, synthetic construct
  misc_feature 1..22: note = chemically synthesized
  source 1..22: mol_type = other DNA
ttacatggggggaaactgaggc

SEQ ID NO: 47749 - DNA, 22 bp, synthetic construct
  misc_feature 1..22: note = chemically synthesized
  source 1..22: mol_type = other DNA
acatggggggaaactgaggccc

SEQ ID NO: 47750 - DNA, 22 bp, synthetic construct
  misc_feature 1..22: note = chemically synthesized
  source 1..22: mol_type = other DNA
catggggggaaactgaggcccg

SEQ ID NO: 47751 - DNA, 22 bp, synthetic construct
  misc_feature 1..22: note = chemically synthesized
  source 1..22: mol_type = other DNA
aggcccgagaggaaacagcacc

SEQ ID NO: 47752 - DNA, 22 bp, synthetic construct
  misc_feature 1..22: note = chemically synthesized
  source 1..22: mol_type = other DNA
cgggttcgccccggcctcccat

SEQ ID NO: 47753 - DNA, 22 bp, synthetic construct
  misc_feature 1..22: note = chemically synthesized
  source 1..22: mol_type = other DNA
gccccggcctcccatccctaca

SEQ ID NO: 47754 - DNA, 22 bp, synthetic construct
  misc_feature 1..22: note = chemically synthesized
  source 1..22: mol_type = other DNA
ccatccctacacccgcaccttg

SEQ ID NO: 47755 - DNA, 22 bp, synthetic construct
  misc_feature 1..22: note = chemically synthesized
  source 1..22: mol_type = other DNA
cacccgcaccttggcgcagcgg

SEQ ID NO: 47756 - DNA, 22 bp, synthetic construct
  misc_feature 1..22: note = chemically synthesized
  source 1..22: mol_type = other DNA
ggcgcagcggtggaaggtggct

SEQ ID NO: 47757 - DNA, 22 bp, synthetic construct
  misc_feature 1..22: note = chemically synthesized
  source 1..22: mol_type = other DNA
gcgcagcggtggaaggtggctg

SEQ ID NO: 47758 - DNA, 22 bp, synthetic construct
  misc_feature 1..22: note = chemically synthesized
  source 1..22: mol_type = other DNA
tggttccgtgctcgggtgcttc

SEQ ID NO: 47759 - DNA, 22 bp, synthetic construct
  misc_feature 1..22: note = chemically synthesized
  source 1..22: mol_type = other DNA
cgtgctcgggtgcttcggccag

SEQ ID NO: 47760 - DNA, 22 bp, synthetic construct
  misc_feature 1..22: note = chemically synthesized
  source 1..22: mol_type = other DNA
gggtgcttcggccaggccgtcc

SEQ ID NO: 47761 - DNA, 22 bp, synthetic construct
  misc_feature 1..22: note = chemically synthesized
  source 1..22: mol_type = other DNA
cggccaggccgtcctcctcgga

SEQ ID NO: 47762 - DNA, 22 bp, synthetic construct
  misc_feature 1..22: note = chemically synthesized
  source 1..22: mol_type = other DNA
ggccaggccgtcctcctcggaa

SEQ ID NO: 47763 - DNA, 22 bp, synthetic construct
  misc_feature 1..22: note = chemically synthesized
  source 1..22: mol_type = other DNA
ctcggaacgcaaggctagcacc

SEQ ID NO: 47764 - DNA, 22 bp, synthetic construct
  misc_feature 1..22: note = chemically synthesized
  source 1..22: mol_type = other DNA
ggaacgcaaggctagcaccagc

SEQ ID NO: 47765 - DNA, 22 bp, synthetic construct
  misc_feature 1..22: note = chemically synthesized
  source 1..22: mol_type = other DNA
gcaccagctcctcgtagtcgcc

SEQ ID NO: 47766 - DNA, 22 bp, synthetic construct
  misc_feature 1..22: note = chemically synthesized
  source 1..22: mol_type = other DNA
ctcgtagtcgccgtcctcgtcc

SEQ ID NO: 47767 - DNA, 22 bp, synthetic construct
  misc_feature 1..22: note = chemically synthesized
  source 1..22: mol_type = other DNA
gtagtcgccgtcctcgtcctcc

SEQ ID NO: 47768 - DNA, 22 bp, synthetic construct
  misc_feature 1..22: note = chemically synthesized
  source 1..22: mol_type = other DNA
gtcctcctgcgcacgggcgccc

SEQ ID NO: 47769 - DNA, 22 bp, synthetic construct
  misc_feature 1..22: note = chemically synthesized
  source 1..22: mol_type = other DNA
ctgcgcacgggcgcccgcggga

SEQ ID NO: 47770 - DNA, 22 bp, synthetic construct
  misc_feature 1..22: note = chemically synthesized
  source 1..22: mol_type = other DNA
cgcacgggcgcccgcgggaccc

SEQ ID NO: 47771 - DNA, 22 bp, synthetic construct
  misc_feature 1..22: note = chemically synthesized
  source 1..22: mol_type = other DNA
gagctgacggtgcccatgaggg

SEQ ID NO: 47772 - DNA, 22 bp, synthetic construct
  misc_feature 1..22: note = chemically synthesized
  source 1..22: mol_type = other DNA
acggtgcccatgagggccaggg

SEQ ID NO: 47773 - DNA, 22 bp, synthetic construct
  misc_feature 1..22: note = chemically synthesized
  source 1..22: mol_type = other DNA
ctgtcctggcgaggagacctag

SEQ ID NO: 47774 - DNA, 22 bp, synthetic construct
  misc_feature 1..22: note = chemically synthesized
  source 1..22: mol_type = other DNA
tcctggcgaggagacctagagg

SEQ ID NO: 47775 - DNA, 22 bp, synthetic construct
  misc_feature 1..22: note = chemically synthesized
  source 1..22: mol_type = other DNA
gcgaggagacctagaggccgtg

SEQ ID NO: 47776 - DNA, 22 bp, synthetic construct
  misc_feature 1..22: note = chemically synthesized
  source 1..22: mol_type = other DNA
gaggccgtgcgcggtccacgcc

SEQ ID NO: 47777 - DNA, 22 bp, synthetic construct
  misc_feature 1..22: note = chemically synthesized
  source 1..22: mol_type = other DNA
gagccttgcggtggggaggact

SEQ ID NO: 47778 - DNA, 22 bp, synthetic construct
  misc_feature 1..22: note = chemically synthesized
  source 1..22: mol_type = other DNA
agccttgcggtggggaggactg

SEQ ID NO: 47779 - DNA, 22 bp, synthetic construct
  misc_feature 1..22: note = chemically synthesized
  source 1..22: mol_type = other DNA
gcggtggggaggactgtgcagg

SEQ ID NO: 47780 - DNA, 22 bp, synthetic construct
  misc_feature 1..22: note = chemically synthesized
  source 1..22: mol_type = other DNA
cggtggggaggactgtgcagga

SEQ ID NO: 47781 - DNA, 22 bp, synthetic construct
  misc_feature 1..22: note = chemically synthesized
  source 1..22: mol_type = other DNA
tgcaggagctgaagttcaggag

SEQ ID NO: 47782 - DNA, 22 bp, synthetic construct
  misc_feature 1..22: note = chemically synthesized
  source 1..22: mol_type = other DNA
aagttcaggagcagggcgcgtg

SEQ ID NO: 47783 - DNA, 22 bp, synthetic construct
  misc_feature 1..22: note = chemically synthesized
  source 1..22: mol_type = other DNA
aggagcagggcgcgtgaagggg

SEQ ID NO: 47784 - DNA, 22 bp, synthetic construct
  misc_feature 1..22: note = chemically synthesized
  source 1..22: mol_type = other DNA
gctgggagctgggagccgctgc

SEQ ID NO: 47785 - DNA, 22 bp, synthetic construct
  misc_feature 1..22: note = chemically synthesized
  source 1..22: mol_type = other DNA
ggagctgggagccgctgctgca

SEQ ID NO: 47786 - DNA, 22 bp, synthetic construct
  misc_feature 1..22: note = chemically synthesized
  source 1..22: mol_type = other DNA
ggagccgctgctgcaacgacgc

SEQ ID NO: 47787 - DNA, 22 bp, synthetic construct
  misc_feature 1..22: note = chemically synthesized
  source 1..22: mol_type = other DNA
ctgcaacgacgcgtcccggccc

SEQ ID NO: 47788 - DNA, 22 bp, synthetic construct
  misc_feature 1..22: note = chemically synthesized
  source 1..22: mol_type = other DNA
caacgacgcgtcccggcccgcc

SEQ ID NO: 47789 - DNA, 22 bp, synthetic construct
  misc_feature 1..22: note = chemically synthesized
  source 1..22: mol_type = other DNA
actgcctggctcactcctccag

SEQ ID NO: 47790 - DNA, 22 bp, synthetic construct
  misc_feature 1..22: note = chemically synthesized
  source 1..22: mol_type = other DNA
cctggctcactcctccaggctc

SEQ ID NO: 47791 - DNA, 22 bp, synthetic construct
  misc_feature 1..22: note = chemically synthesized
  source 1..22: mol_type = other DNA
gctcactcctccaggctcagac

SEQ ID NO: 47792 - DNA, 22 bp, synthetic construct
  misc_feature 1..22: note = chemically synthesized
  source 1..22: mol_type = other DNA
actcctccaggctcagaccctg

SEQ ID NO: 47793 - DNA, 22 bp, synthetic construct
  misc_feature 1..22: note = chemically synthesized
  source 1..22: mol_type = other DNA
ctccaggctcagaccctgaact

SEQ ID NO: 47794 - DNA, 22 bp, synthetic construct
  misc_feature 1..22: note = chemically synthesized
  source 1..22: mol_type = other DNA
caggctcagaccctgaactgaa

SEQ ID NO: 47795 - DNA, 22 bp, synthetic construct
  misc_feature 1..22: note = chemically synthesized
  source 1..22: mol_type = other DNA
agaccctgaactgaacggcggc

SEQ ID NO: 47796 - DNA, 22 bp, synthetic construct
  misc_feature 1..22: note = chemically synthesized
  source 1..22: mol_type = other DNA
aactgaacggcggcgcccgcct

SEQ ID NO: 47797 - DNA, 22 bp, synthetic construct
  misc_feature 1..22: note = chemically synthesized
  source 1..22: mol_type = other DNA
aacggcggcgcccgcctgcaac

SEQ ID NO: 47798 - DNA, 22 bp, synthetic construct
  misc_feature 1..22: note = chemically synthesized
  source 1..22: mol_type = other DNA
caaccatgagcgcctcgacgtc

SEQ ID NO: 47799 - DNA, 22 bp, synthetic construct
  misc_feature 1..22: note = chemically synthesized
  source 1..22: mol_type = other DNA
gacgtcgctgcggaaaccttct

SEQ ID NO: 47800 - DNA, 22 bp, synthetic construct
  misc_feature 1..22: note = chemically synthesized
  source 1..22: mol_type = other DNA
cggaaaccttctagggtgtggg

SEQ ID NO: 47801 - DNA, 22 bp, synthetic construct
  misc_feature 1..22: note = chemically synthesized
  source 1..22: mol_type = other DNA
ctagggtgtgggtgcttgacgc

SEQ ID NO: 47802 - DNA, 22 bp, synthetic construct
  misc_feature 1..22: note = chemically synthesized
  source 1..22: mol_type = other DNA
tagggtgtgggtgcttgacgcc

SEQ ID NO: 47803 - DNA, 22 bp, synthetic construct
  misc_feature 1..22: note = chemically synthesized
  source 1..22: mol_type = other DNA
gggtgtgggtgcttgacgcctg

SEQ ID NO: 47804 - DNA, 22 bp, synthetic construct
  misc_feature 1..22: note = chemically synthesized
  source 1..22: mol_type = other DNA
gacgcctggggcgcgcagatca

SEQ ID NO: 47805 - DNA, 22 bp, synthetic construct
  misc_feature 1..22: note = chemically synthesized
  source 1..22: mol_type = other DNA
acgcctggggcgcgcagatcac

SEQ ID NO: 47806 - DNA, 22 bp, synthetic construct
  misc_feature 1..22: note = chemically synthesized
  source 1..22: mol_type = other DNA
gggcgcgcagatcacgccacca

SEQ ID NO: 47807 - DNA, 22 bp, synthetic construct
  misc_feature 1..22: note = chemically synthesized
  source 1..22: mol_type = other DNA
tctgattaaacattaacggaac

SEQ ID NO: 47808 - DNA, 22 bp, synthetic construct
  misc_feature 1..22: note = chemically synthesized
  source 1..22: mol_type = other DNA
attaaacattaacggaaccccc

SEQ ID NO: 47809 - DNA, 22 bp, synthetic construct
  misc_feature 1..22: note = chemically synthesized
  source 1..22: mol_type = other DNA
aacattaacggaacccccggac

SEQ ID NO: 47810 - DNA, 22 bp, synthetic construct
  misc_feature 1..22: note = chemically synthesized
  source 1..22: mol_type = other DNA
acggaacccccggactggagga

SEQ ID NO: 47811 - DNA, 22 bp, synthetic construct
  misc_feature 1..22: note = chemically synthesized
  source 1..22: mol_type = other DNA
gaggatcaggtttcggcctcgc

SEQ ID NO: 47812 - DNA, 22 bp, synthetic construct
  misc_feature 1..22: note = chemically synthesized
  source 1..22: mol_type = other DNA
cggcctcgccctccccaaacag

SEQ ID NO: 47813 - DNA, 22 bp, synthetic construct
  misc_feature 1..22: note = chemically synthesized
  source 1..22: mol_type = other DNA
ggcctcgccctccccaaacagc

SEQ ID NO: 47814 - DNA, 22 bp, synthetic construct
  misc_feature 1..22: note = chemically synthesized
  source 1..22: mol_type = other DNA
gccctccccaaacagcgtcaga

SEQ ID NO: 47815 - DNA, 22 bp, synthetic construct
  misc_feature 1..22: note = chemically synthesized
  source 1..22: mol_type = other DNA
cccaaacagcgtcagattacgc

SEQ ID NO: 47816 - DNA, 22 bp, synthetic construct
  misc_feature 1..22: note = chemically synthesized
  source 1..22: mol_type = other DNA
cgcgcagagggaagaaaaaact

SEQ ID NO: 47817 - DNA, 22 bp, synthetic construct
  misc_feature 1..22: note = chemically synthesized
  source 1..22: mol_type = other DNA
ccaaatcctaactgggctggaa

SEQ ID NO: 47818 - DNA, 22 bp, synthetic construct
  misc_feature 1..22: note = chemically synthesized
  source 1..22: mol_type = other DNA
actgggctggaaggcaggccgg

SEQ ID NO: 47819 - DNA, 22 bp, synthetic construct
  misc_feature 1..22: note = chemically synthesized
  source 1..22: mol_type = other DNA
ggctggaaggcaggccggcgcc

SEQ ID NO: 47820 - DNA, 22 bp, synthetic construct
  misc_feature 1..22: note = chemically synthesized
  source 1..22: mol_type = other DNA
gaaggcaggccggcgccctagg

SEQ ID NO: 47821 - DNA, 22 bp, synthetic construct
  misc_feature 1..22: note = chemically synthesized
  source 1..22: mol_type = other DNA
ggggctcctcctctcccgcctc

SEQ ID NO: 47822 - DNA, 22 bp, synthetic construct
  misc_feature 1..22: note = chemically synthesized
  source 1..22: mol_type = other DNA
ctcctctcccgcctctcaccct

SEQ ID NO: 47823 - DNA, 22 bp, synthetic construct
  misc_feature 1..22: note = chemically synthesized
  source 1..22: mol_type = other DNA
ctctcccgcctctcaccctgcg

SEQ ID NO: 47824 - DNA, 22 bp, synthetic construct
  misc_feature 1..22: note = chemically synthesized
  source 1..22: mol_type = other DNA
tcccgcctctcaccctgcgtgg

SEQ ID NO: 47825 - DNA, 22 bp, synthetic construct
  misc_feature 1..22: note = chemically synthesized
  source 1..22: mol_type = other DNA
ccgcctctcaccctgcgtggga

SEQ ID NO: 47826 - DNA, 22 bp, synthetic construct
  misc_feature 1..22: note = chemically synthesized
  source 1..22: mol_type = other DNA
tcaccctgcgtgggatgccaga

SEQ ID NO: 47827 - DNA, 22 bp, synthetic construct
  misc_feature 1..22: note = chemically synthesized
  source 1..22: mol_type = other DNA
accctgcgtgggatgccagact

SEQ ID NO: 47828 - DNA, 22 bp, synthetic construct
  misc_feature 1..22: note = chemically synthesized
  source 1..22: mol_type = other DNA
cgtgggatgccagactccaagt

SEQ ID NO: 47829 - DNA, 22 bp, synthetic construct
  misc_feature 1..22: note = chemically synthesized
  source 1..22: mol_type = other DNA
caagttctgccgggcccacctt

SEQ ID NO: 47830 - DNA, 22 bp, synthetic construct
  misc_feature 1..22: note = chemically synthesized
  source 1..22: mol_type = other DNA
tgccgggcccaccttttcagtg

SEQ ID NO: 47831 - DNA, 22 bp, synthetic construct
  misc_feature 1..22: note = chemically synthesized
  source 1..22: mol_type = other DNA
ccgggcccaccttttcagtgtt

SEQ ID NO: 47832 - DNA, 22 bp, synthetic construct
  misc_feature 1..22: note = chemically synthesized
  source 1..22: mol_type = other DNA
ttcagtgtttcctgggtccacc

SEQ ID NO: 47833 - DNA, 22 bp, synthetic construct
  misc_feature 1..22: note = chemically synthesized
  source 1..22: mol_type = other DNA
tcagtgtttcctgggtccacct

SEQ ID NO: 47834 - DNA, 22 bp, synthetic construct
  misc_feature 1..22: note = chemically synthesized
  source 1..22: mol_type = other DNA
cagtgtttcctgggtccacctt

SEQ ID NO: 47835 - DNA, 22 bp, synthetic construct
  misc_feature 1..22: note = chemically synthesized
  source 1..22: mol_type = other DNA
agtgtttcctgggtccaccttg

SEQ ID NO: 47836 - DNA, 22 bp, synthetic construct
  misc_feature 1..22: note = chemically synthesized
  source 1..22: mol_type = other DNA
cctgggtccaccttgtctcctg

SEQ ID NO: 47837 - DNA, 22 bp, synthetic construct
  misc_feature 1..22: note = chemically synthesized
  source 1..22: mol_type = other DNA
ctgggtccaccttgtctcctgc

SEQ ID NO: 47838 - DNA, 22 bp, synthetic construct
  misc_feature 1..22: note = chemically synthesized
  source 1..22: mol_type = other DNA
ggtccaccttgtctcctgctga

SEQ ID NO: 47839 - DNA, 22 bp, synthetic construct
  misc_feature 1..22: note = chemically synthesized
  source 1..22: mol_type = other DNA
gtctcctgctgaccagtgagac

SEQ ID NO: 47840 - DNA, 22 bp, synthetic construct
  misc_feature 1..22: note = chemically synthesized
  source 1..22: mol_type = other DNA
tctcctgctgaccagtgagact

SEQ ID NO: 47841 - DNA, 22 bp, synthetic construct
  misc_feature 1..22: note = chemically synthesized
  source 1..22: mol_type = other DNA
ctgctgaccagtgagacttctg

SEQ ID NO: 47842 - DNA, 22 bp, synthetic construct
  misc_feature 1..22: note = chemically synthesized
  source 1..22: mol_type = other DNA
ctgaccagtgagacttctgaat

SEQ ID NO: 47843 - DNA, 22 bp, synthetic construct
  misc_feature 1..22: note = chemically synthesized
  source 1..22: mol_type = other DNA
accagtgagacttctgaatcaa

SEQ ID NO: 47844 - DNA, 22 bp, synthetic construct
  misc_feature 1..22: note = chemically synthesized
  source 1..22: mol_type = other DNA
ctgaatcaatcctactgtggac

SEQ ID NO: 47845 - DNA, 22 bp, synthetic construct
  misc_feature 1..22: note = chemically synthesized
  source 1..22: mol_type = other DNA
tgaatcaatcctactgtggact

SEQ ID NO: 47846 - DNA, 22 bp, synthetic construct
  misc_feature 1..22: note = chemically synthesized
  source 1..22: mol_type = other DNA
aatcaatcctactgtggactcc

SEQ ID NO: 47847 - DNA, 22 bp, synthetic construct
  misc_feature 1..22: note = chemically synthesized
  source 1..22: mol_type = other DNA
ctgtggactcctcgctgcccac

SEQ ID NO: 47848 - DNA, 22 bp, synthetic construct
  misc_feature 1..22: note = chemically synthesized
  source 1..22: mol_type = other DNA
tggactcctcgctgcccaccga

SEQ ID NO: 47849 - DNA, 22 bp, synthetic construct
  misc_feature 1..22: note = chemically synthesized
  source 1..22: mol_type = other DNA
ctcgctgcccaccgaattcttt

SEQ ID NO: 47850 - DNA, 22 bp, synthetic construct
  misc_feature 1..22: note = chemically synthesized
  source 1..22: mol_type = other DNA
gctgcccaccgaattctttcca

SEQ ID NO: 47851 - DNA, 22 bp, synthetic construct
  misc_feature 1..22: note = chemically synthesized
  source 1..22: mol_type = other DNA
cccaccgaattctttccactgg

SEQ ID NO: 47852 - DNA, 22 bp, synthetic construct
  misc_feature 1..22: note = chemically synthesized
  source 1..22: mol_type = other DNA
tttccactggccttaacctggc

SEQ ID NO: 47853 - DNA, 22 bp, synthetic construct
  misc_feature 1..22: note = chemically synthesized
  source 1..22: mol_type = other DNA
tccactggccttaacctggcag

SEQ ID NO: 47854 - DNA, 22 bp, synthetic construct
  misc_feature 1..22: note = chemically synthesized
  source 1..22: mol_type = other DNA
ccactggccttaacctggcagc

SEQ ID NO: 47855 - DNA, 22 bp, synthetic construct
  misc_feature 1..22: note = chemically synthesized
  source 1..22: mol_type = other DNA
cactggccttaacctggcagcc

SEQ ID NO: 47856 - DNA, 22 bp, synthetic construct
  misc_feature 1..22: note = chemically synthesized
  source 1..22: mol_type = other DNA
gccttaacctggcagccttcta

SEQ ID NO: 47857 - DNA, 22 bp, synthetic construct
  misc_feature 1..22: note = chemically synthesized
  source 1..22: mol_type = other DNA
aacctggcagccttctaaactt

SEQ ID NO: 47858 - DNA, 22 bp, synthetic construct
  misc_feature 1..22: note = chemically synthesized
  source 1..22: mol_type = other DNA
acctggcagccttctaaactta

SEQ ID NO: 47859 - DNA, 22 bp, synthetic construct
  misc_feature 1..22: note = chemically synthesized
  source 1..22: mol_type = other DNA
gcagccttctaaacttagcctg

SEQ ID NO: 47860 - DNA, 22 bp, synthetic construct
  misc_feature 1..22: note = chemically synthesized
  source 1..22: mol_type = other DNA
ctaaacttagcctggaccccct

SEQ ID NO: 47861 - DNA, 22 bp, synthetic construct
  misc_feature 1..22: note = chemically synthesized
  source 1..22: mol_type = other DNA
taaacttagcctggaccccctc

SEQ ID NO: 47862 - DNA, 22 bp, synthetic construct
  misc_feature 1..22: note = chemically synthesized
  source 1..22: mol_type = other DNA
aacttagcctggaccccctccg

SEQ ID NO: 47863 - DNA, 22 bp, synthetic construct
  misc_feature 1..22: note = chemically synthesized
  source 1..22: mol_type = other DNA
agcctggaccccctccggcctc

SEQ ID NO: 47864 - DNA, 22 bp, synthetic construct
  misc_feature 1..22: note = chemically synthesized
  source 1..22: mol_type = other DNA
gcctggaccccctccggcctct

SEQ ID NO: 47865 - DNA, 22 bp, synthetic construct
  misc_feature 1..22: note = chemically synthesized
  source 1..22: mol_type = other DNA
gaccccctccggcctctgccct

SEQ ID NO: 47866 - DNA, 22 bp, synthetic construct
  misc_feature 1..22: note = chemically synthesized
  source 1..22: mol_type = other DNA
cggcctctgccctttatgcacc

SEQ ID NO: 47867 - DNA, 22 bp, synthetic construct
  misc_feature 1..22: note = chemically synthesized
  source 1..22: mol_type = other DNA
tgccctttatgcaccctgcaca

SEQ ID NO: 47868 - DNA, 22 bp, synthetic construct
  misc_feature 1..22: note = chemically synthesized
  source 1..22: mol_type = other DNA
ccctttatgcaccctgcacact

SEQ ID NO: 47869 - DNA, 22 bp, synthetic construct
  misc_feature 1..22: note = chemically synthesized
  source 1..22: mol_type = other DNA
tatgcaccctgcacactgacct

SEQ ID NO: 47870 - DNA, 22 bp, synthetic construct
  misc_feature 1..22: note = chemically synthesized
  source 1..22: mol_type = other DNA
atgcaccctgcacactgacctt

SEQ ID NO: 47871 - DNA, 22 bp, synthetic construct
  misc_feature 1..22: note = chemically synthesized
  source 1..22: mol_type = other DNA
tgcaccctgcacactgacctta

SEQ ID NO: 47872 - DNA, 22 bp, synthetic construct
  misc_feature 1..22: note = chemically synthesized
  source 1..22: mol_type = other DNA
cacactgaccttaccaactagc

SEQ ID NO: 47873 - DNA, 22 bp, synthetic construct
  misc_feature 1..22: note = chemically synthesized
  source 1..22: mol_type = other DNA
accttaccaactagctgctcct

SEQ ID NO: 47874 - DNA, 22 bp, synthetic construct
  misc_feature 1..22: note = chemically synthesized
  source 1..22: mol_type = other DNA
accaactagctgctccttgaag

SEQ ID NO: 47875 - DNA, 22 bp, synthetic construct
  misc_feature 1..22: note = chemically synthesized
  source 1..22: mol_type = other DNA
ccaactagctgctccttgaaga

SEQ ID NO: 47876 - DNA, 22 bp, synthetic construct
  misc_feature 1..22: note = chemically synthesized
  source 1..22: mol_type = other DNA
gctgctccttgaagagattgct

SEQ ID NO: 47877 - DNA, 22 bp, synthetic construct
  misc_feature 1..22: note = chemically synthesized
  source 1..22: mol_type = other DNA
ctccttgaagagattgcttgct

SEQ ID NO: 47878 - DNA, 22 bp, synthetic construct
  misc_feature 1..22: note = chemically synthesized
  source 1..22: mol_type = other DNA
cttgaagagattgcttgctttt

SEQ ID NO: 47879 - DNA, 22 bp, synthetic construct
  misc_feature 1..22: note = chemically synthesized
  source 1..22: mol_type = other DNA
gaagagattgcttgcttttgat

SEQ ID NO: 47880 - DNA, 22 bp, synthetic construct
  misc_feature 1..22: note = chemically synthesized
  source 1..22: mol_type = other DNA
aagagattgcttgcttttgatg

SEQ ID NO: 47881 - DNA, 22 bp, synthetic construct
  misc_feature 1..22: note = chemically synthesized
  source 1..22: mol_type = other DNA
cttgcttttgatgtccagccta

SEQ ID NO: 47882 - DNA, 22 bp, synthetic construct
  misc_feature 1..22: note = chemically synthesized
  source 1..22: mol_type = other DNA
gcttttgatgtccagcctacat

SEQ ID NO: 47883 - DNA, 22 bp, synthetic construct
  misc_feature 1..22: note = chemically synthesized
  source 1..22: mol_type = other DNA
cttttgatgtccagcctacatg

SEQ ID NO: 47884 - DNA, 22 bp, synthetic construct
  misc_feature 1..22: note = chemically synthesized
  source 1..22: mol_type = other DNA
ttgatgtccagcctacatgcat

SEQ ID NO: 47885 - DNA, 22 bp, synthetic construct
  misc_feature 1..22: note = chemically synthesized
  source 1..22: mol_type = other DNA
tgatgtccagcctacatgcatt

SEQ ID NO: 47886 - DNA, 22 bp, synthetic construct
  misc_feature 1..22: note = chemically synthesized
  source 1..22: mol_type = other DNA
gatgtccagcctacatgcattt

SEQ ID NO: 47887 - DNA, 22 bp, synthetic construct
  misc_feature 1..22: note = chemically synthesized
  source 1..22: mol_type = other DNA
atgtccagcctacatgcatttc

SEQ ID NO: 47888 - DNA, 22 bp, synthetic construct
  misc_feature 1..22: note = chemically synthesized
  source 1..22: mol_type = other DNA
catgcatttcaagggatttata

SEQ ID NO: 47889 - DNA, 22 bp, synthetic construct
  misc_feature 1..22: note = chemically synthesized
  source 1..22: mol_type = other DNA
caagggatttatactacaaaga

SEQ ID NO: 47890 - DNA, 22 bp, synthetic construct
  misc_feature 1..22: note = chemically synthesized
  source 1..22: mol_type = other DNA
aagggatttatactacaaagat

SEQ ID NO: 47891 - DNA, 22 bp, synthetic construct
  misc_feature 1..22: note = chemically synthesized
  source 1..22: mol_type = other DNA
atactacaaagattcaggtttt

SEQ ID NO: 47892 - DNA, 22 bp, synthetic construct
  misc_feature 1..22: note = chemically synthesized
  source 1..22: mol_type = other DNA
tactacaaagattcaggtttta

SEQ ID NO: 47893 - DNA, 22 bp, synthetic construct
  misc_feature 1..22: note = chemically synthesized
  source 1..22: mol_type = other DNA
caaagattcaggttttaagttt

SEQ ID NO: 47894 - DNA, 22 bp, synthetic construct
  misc_feature 1..22: note = chemically synthesized
  source 1..22: mol_type = other DNA
aggttttaagtttgcaaagacg

SEQ ID NO: 47895 - DNA, 22 bp, synthetic construct
  misc_feature 1..22: note = chemically synthesized
  source 1..22: mol_type = other DNA
taagtttgcaaagacgtcatat

SEQ ID NO: 47896 - DNA, 22 bp, synthetic construct
  misc_feature 1..22: note = chemically synthesized
  source 1..22: mol_type = other DNA
aagtttgcaaagacgtcatata

SEQ ID NO: 47897 - DNA, 22 bp, synthetic construct
  misc_feature 1..22: note = chemically synthesized
  source 1..22: mol_type = other DNA
agtttgcaaagacgtcatatag

SEQ ID NO: 47898 - DNA, 22 bp, synthetic construct
  misc_feature 1..22: note = chemically synthesized
  source 1..22: mol_type = other DNA
gcaaagacgtcatataggtaca

SEQ ID NO: 47899 - DNA, 22 bp, synthetic construct
  misc_feature 1..22: note = chemically synthesized
  source 1..22: mol_type = other DNA
caaagacgtcatataggtacat

SEQ ID NO: 47900 - DNA, 22 bp, synthetic construct
  misc_feature 1..22: note = chemically synthesized
  source 1..22: mol_type = other DNA
agaattctatggtaggcacaag

SEQ ID NO: 47901 - DNA, 22 bp, synthetic construct
  misc_feature 1..22: note = chemically synthesized
  source 1..22: mol_type = other DNA
tatggtaggcacaagctcagct

SEQ ID NO: 47902 - DNA, 22 bp, synthetic construct
  misc_feature 1..22: note = chemically synthesized
  source 1..22: mol_type = other DNA
tggtaggcacaagctcagcttt

SEQ ID NO: 47903 - DNA, 22 bp, synthetic construct
  misc_feature 1..22: note = chemically synthesized
  source 1..22: mol_type = other DNA
agctttccagaagattcaattt

SEQ ID NO: 47904 - DNA, 22 bp, synthetic construct
  misc_feature 1..22: note = chemically synthesized
  source 1..22: mol_type = other DNA
tccagaagattcaatttgcaaa

SEQ ID NO: 47905 - DNA, 22 bp, synthetic construct
  misc_feature 1..22: note = chemically synthesized
  source 1..22: mol_type = other DNA
ccagaagattcaatttgcaaag

SEQ ID NO: 47906 - DNA, 22 bp, synthetic construct
  misc_feature 1..22: note = chemically synthesized
  source 1..22: mol_type = other DNA
cagaagattcaatttgcaaaga

SEQ ID NO: 47907 - DNA, 22 bp, synthetic construct
  misc_feature 1..22: note = chemically synthesized
  source 1..22: mol_type = other DNA
aatttgcaaagattccttttac

SEQ ID NO: 47908 - DNA, 22 bp, synthetic construct
  misc_feature 1..22: note = chemically synthesized
  source 1..22: mol_type = other DNA
gcaaagattccttttacacacc

SEQ ID NO: 47909 - DNA, 22 bp, synthetic construct
  misc_feature 1..22: note = chemically synthesized
  source 1..22: mol_type = other DNA
caaagattccttttacacacca

SEQ ID NO: 47910 - DNA, 22 bp, synthetic construct
  misc_feature 1..22: note = chemically synthesized
  source 1..22: mol_type = other DNA
cttttacacaccatgttcaaga

SEQ ID NO: 47911 - DNA, 22 bp, synthetic construct
  misc_feature 1..22: note = chemically synthesized
  source 1..22: mol_type = other DNA
ttacacaccatgttcaagaaat

SEQ ID NO: 47912 - DNA, 22 bp, synthetic construct
  misc_feature 1..22: note = chemically synthesized
  source 1..22: mol_type = other DNA
tacacaccatgttcaagaaatc

SEQ ID NO: 47913 - DNA, 22 bp, synthetic construct
  misc_feature 1..22: note = chemically synthesized
  source 1..22: mol_type = other DNA
acacaccatgttcaagaaatca

SEQ ID NO: 47914 - DNA, 22 bp, synthetic construct
  misc_feature 1..22: note = chemically synthesized
  source 1..22: mol_type = other DNA
cacaccatgttcaagaaatcaa

SEQ ID NO: 47915 - DNA, 22 bp, synthetic construct
  misc_feature 1..22: note = chemically synthesized
  source 1..22: mol_type = other DNA
aagaaatcaactggacaagcat

SEQ ID NO: 47916 - DNA, 22 bp, synthetic construct
  misc_feature 1..22: note = chemically synthesized
  source 1..22: mol_type = other DNA
gacaagcatccagtaaacacct

SEQ ID NO: 47917 - DNA, 22 bp, synthetic construct
  misc_feature 1..22: note = chemically synthesized
  source 1..22: mol_type = other DNA
ttgtgtaccaggcaggaggatg

SEQ ID NO: 47918 - DNA, 22 bp, synthetic construct
  misc_feature 1..22: note = chemically synthesized
  source 1..22: mol_type = other DNA
tgtaccaggcaggaggatgaaa

SEQ ID NO: 47919 - DNA, 22 bp, synthetic construct
  misc_feature 1..22: note = chemically synthesized
  source 1..22: mol_type = other DNA
ctggcctcagattgtacatgtg

SEQ ID NO: 47920 - DNA, 22 bp, synthetic construct
  misc_feature 1..22: note = chemically synthesized
  source 1..22: mol_type = other DNA
gcctcagattgtacatgtggca

SEQ ID NO: 47921 - DNA, 22 bp, synthetic construct
  misc_feature 1..22: note = chemically synthesized
  source 1..22: mol_type = other DNA
agattgtacatgtggcatgaca

SEQ ID NO: 47922 - DNA, 22 bp, synthetic construct
  misc_feature 1..22: note = chemically synthesized
  source 1..22: mol_type = other DNA
tacatgtggcatgacatgaggc

SEQ ID NO: 47923 - DNA, 22 bp, synthetic construct
  misc_feature 1..22: note = chemically synthesized
  source 1..22: mol_type = other DNA
gctctttctggaagggctgtcg

SEQ ID NO: 47924 - DNA, 22 bp, synthetic construct
  misc_feature 1..22: note = chemically synthesized
  source 1..22: mol_type = other DNA
ctctttctggaagggctgtcga

SEQ ID NO: 47925 - DNA, 22 bp, synthetic construct
  misc_feature 1..22: note = chemically synthesized
  source 1..22: mol_type = other DNA
tttctggaagggctgtcgatac

SEQ ID NO: 47926 - DNA, 22 bp, synthetic construct
  misc_feature 1..22: note = chemically synthesized
  source 1..22: mol_type = other DNA
tctggaagggctgtcgatactg

SEQ ID NO: 47927 - DNA, 22 bp, synthetic construct
  misc_feature 1..22: note = chemically synthesized
  source 1..22: mol_type = other DNA
ctggaagggctgtcgatactgg

SEQ ID NO: 47928 - DNA, 22 bp, synthetic construct
  misc_feature 1..22: note = chemically synthesized
  source 1..22: mol_type = other DNA
tggaagggctgtcgatactggg

SEQ ID NO: 47929 - DNA, 22 bp, synthetic construct
  misc_feature 1..22: note = chemically synthesized
  source 1..22: mol_type = other DNA
gaagggctgtcgatactgggaa

SEQ ID NO: 47930 - DNA, 22 bp, synthetic construct
  misc_feature 1..22: note = chemically synthesized
  source 1..22: mol_type = other DNA
tcgatactgggaagaaacaaag

SEQ ID NO: 47931 - DNA, 22 bp, synthetic construct
  misc_feature 1..22: note = chemically synthesized
  source 1..22: mol_type = other DNA
ggaagaaacaaaggcgaattta

SEQ ID NO: 47932 - DNA, 22 bp, synthetic construct
  misc_feature 1..22: note = chemically synthesized
  source 1..22: mol_type = other DNA
atgatcctcccttgcagatgca

SEQ ID NO: 47933 - DNA, 22 bp, synthetic construct
  misc_feature 1..22: note = chemically synthesized
  source 1..22: mol_type = other DNA
tgatcctcccttgcagatgcac

SEQ ID NO: 47934 - DNA, 22 bp, synthetic construct
  misc_feature 1..22: note = chemically synthesized
  source 1..22: mol_type = other DNA
ccttgcagatgcacagcagatt

SEQ ID NO: 47935 - DNA, 22 bp, synthetic construct
  misc_feature 1..22: note = chemically synthesized
  source 1..22: mol_type = other DNA
gcagatgcacagcagattccga

SEQ ID NO: 47936 - DNA, 22 bp, synthetic construct
  misc_feature 1..22: note = chemically synthesized
  source 1..22: mol_type = other DNA
cagatgcacagcagattccgag

SEQ ID NO: 47937 - DNA, 22 bp, synthetic construct
  misc_feature 1..22: note = chemically synthesized
  source 1..22: mol_type = other DNA
cgagtgaaatggcctgctctga

SEQ ID NO: 47938 - DNA, 22 bp, synthetic construct
  misc_feature 1..22: note = chemically synthesized
  source 1..22: mol_type = other DNA
ctctgaatctaggtgctggagt

SEQ ID NO: 47939 - DNA, 22 bp, synthetic construct
  misc_feature 1..22: note = chemically synthesized
  source 1..22: mol_type = other DNA
tgaatctaggtgctggagtcca

SEQ ID NO: 47940 - DNA, 22 bp, synthetic construct
  misc_feature 1..22: note = chemically synthesized
  source 1..22: mol_type = other DNA
aatctaggtgctggagtccaaa

SEQ ID NO: 47941 - DNA, 22 bp, synthetic construct
  misc_feature 1..22: note = chemically synthesized
  source 1..22: mol_type = other DNA
ggtgctggagtccaaagttgat

SEQ ID NO: 47942 - DNA, 22 bp, synthetic construct
  misc_feature 1..22: note = chemically synthesized
  source 1..22: mol_type = other DNA
gagtccaaagttgatgctcttt

SEQ ID NO: 47943 - DNA, 22 bp, synthetic construct
  misc_feature 1..22: note = chemically synthesized
  source 1..22: mol_type = other DNA
atgctctttccactttgtttgc

SEQ ID NO: 47944 - DNA, 22 bp, synthetic construct
  misc_feature 1..22: note = chemically synthesized
  source 1..22: mol_type = other DNA
tttccactttgtttgcaaagac

SEQ ID NO: 47945 - DNA, 22 bp, synthetic construct
  misc_feature 1..22: note = chemically synthesized
  source 1..22: mol_type = other DNA
tccactttgtttgcaaagacct

SEQ ID NO: 47946 - DNA, 22 bp, synthetic construct
  misc_feature 1..22: note = chemically synthesized
  source 1..22: mol_type = other DNA
ccactttgtttgcaaagacctc

SEQ ID NO: 47947 - DNA, 22 bp, synthetic construct
  misc_feature 1..22: note = chemically synthesized
  source 1..22: mol_type = other DNA
cactttgtttgcaaagacctca

SEQ ID NO: 47948 - DNA, 22 bp, synthetic construct
  misc_feature 1..22: note = chemically synthesized
  source 1..22: mol_type = other DNA
tgtttgcaaagacctcactcca

SEQ ID NO: 47949 - DNA, 22 bp, synthetic construct
  misc_feature 1..22: note = chemically synthesized
  source 1..22: mol_type = other DNA
gtttgcaaagacctcactccag

SEQ ID NO: 47950 - DNA, 22 bp, synthetic construct
  misc_feature 1..22: note = chemically synthesized
  source 1..22: mol_type = other DNA
tttgcaaagacctcactccaga

SEQ ID NO: 47951 - DNA, 22 bp, synthetic construct
  misc_feature 1..22: note = chemically synthesized
  source 1..22: mol_type = other DNA
gcaaagacctcactccagagag

SEQ ID NO: 47952 - DNA, 22 bp, synthetic construct
  misc_feature 1..22: note = chemically synthesized
  source 1..22: mol_type = other DNA
caaagacctcactccagagagc

SEQ ID NO: 47953 - DNA, 22 bp, synthetic construct
  misc_feature 1..22: note = chemically synthesized
  source 1..22: mol_type = other DNA
actccagagagccagtgcacaa

SEQ ID NO: 47954 - DNA, 22 bp, synthetic construct
  misc_feature 1..22: note = chemically synthesized
  source 1..22: mol_type = other DNA
cagagagccagtgcacaaagac

SEQ ID NO: 47955 - DNA, 22 bp, synthetic construct
  misc_feature 1..22: note = chemically synthesized
  source 1..22: mol_type = other DNA
acagtgactccatgaggtaagg

SEQ ID NO: 47956 - DNA, 22 bp, synthetic construct
  misc_feature 1..22: note = chemically synthesized
  source 1..22: mol_type = other DNA
catgaggtaaggtcagagttat

SEQ ID NO: 47957 - DNA, 22 bp, synthetic construct
  misc_feature 1..22: note = chemically synthesized
  source 1..22: mol_type = other DNA
tccccatcgagcccgccatcgc

SEQ ID NO: 47958 - DNA, 22 bp, synthetic construct
  misc_feature 1..22: note = chemically synthesized
  source 1..22: mol_type = other DNA
atggtttgctgacagaggtggc

SEQ ID NO: 47959 - DNA, 22 bp, synthetic construct
  misc_feature 1..22: note = chemically synthesized
  source 1..22: mol_type = other DNA
gctgacagaggtggcagaggtg

SEQ ID NO: 47960 - DNA, 22 bp, synthetic construct
  misc_feature 1..22: note = chemically synthesized
  source 1..22: mol_type = other DNA
ctgacagaggtggcagaggtgg

SEQ ID NO: 47961 - DNA, 22 bp, synthetic construct
  misc_feature 1..22: note = chemically synthesized
  source 1..22: mol_type = other DNA
acagaggtggcagaggtggttc

SEQ ID NO: 47962 - DNA, 22 bp, synthetic construct
  misc_feature 1..22: note = chemically synthesized
  source 1..22: mol_type = other DNA
tccttcctgttgcctgtaattg

SEQ ID NO: 47963 - DNA, 22 bp, synthetic construct
  misc_feature 1..22: note = chemically synthesized
  source 1..22: mol_type = other DNA
cttcctgttgcctgtaattgga

SEQ ID NO: 47964 - DNA, 22 bp, synthetic construct
  misc_feature 1..22: note = chemically synthesized
  source 1..22: mol_type = other DNA
cctgttgcctgtaattggaatt

SEQ ID NO: 47965 - DNA, 22 bp, synthetic construct
  misc_feature 1..22: note = chemically synthesized
  source 1..22: mol_type = other DNA
ctgttgcctgtaattggaattg

SEQ ID NO: 47966 - DNA, 22 bp, synthetic construct
  misc_feature 1..22: note = chemically synthesized
  source 1..22: mol_type = other DNA
ttgcctgtaattggaattgtat

SEQ ID NO: 47967 - DNA, 22 bp, synthetic construct
  misc_feature 1..22: note = chemically synthesized
  source 1..22: mol_type = other DNA
cctgtaattggaattgtatttg

SEQ ID NO: 47968 - DNA, 22 bp, synthetic construct
  misc_feature 1..22: note = chemically synthesized
  source 1..22: mol_type = other DNA
taattggaattgtatttgcaat

SEQ ID NO: 47969 - DNA, 22 bp, synthetic construct
  misc_feature 1..22: note = chemically synthesized
  source 1..22: mol_type = other DNA
gaattgtatttgcaatgtgctt

SEQ ID NO: 47970 - DNA, 22 bp, synthetic construct
  misc_feature 1..22: note = chemically synthesized
  source 1..22: mol_type = other DNA
tatttgcaatgtgcttttggca

SEQ ID NO: 47971 - DNA, 22 bp, synthetic construct
  misc_feature 1..22: note = chemically synthesized
  source 1..22: mol_type = other DNA
gcaatgtgcttttggcagcttc

SEQ ID NO: 47972 - DNA, 22 bp, synthetic construct
  misc_feature 1..22: note = chemically synthesized
  source 1..22: mol_type = other DNA
caatgtgcttttggcagcttcc

SEQ ID NO: 47973 - DNA, 22 bp, synthetic construct
  misc_feature 1..22: note = chemically synthesized
  source 1..22: mol_type = other DNA
ttggcagcttcctcatcaaagg

SEQ ID NO: 47974 - DNA, 22 bp, synthetic construct
  misc_feature 1..22: note = chemically synthesized
  source 1..22: mol_type = other DNA
tggcagcttcctcatcaaaggc

SEQ ID NO: 47975 - DNA, 22 bp, synthetic construct
  misc_feature 1..22: note = chemically synthesized
  source 1..22: mol_type = other DNA
ggcagcttcctcatcaaaggcc

SEQ ID NO: 47976 - DNA, 22 bp, synthetic construct
  misc_feature 1..22: note = chemically synthesized
  source 1..22: mol_type = other DNA
gcagcttcctcatcaaaggcct

SEQ ID NO: 47977 - DNA, 22 bp, synthetic construct
  misc_feature 1..22: note = chemically synthesized
  source 1..22: mol_type = other DNA
cctcatcaaaggcctcccctgg

SEQ ID NO: 47978 - DNA, 22 bp, synthetic construct
  misc_feature 1..22: note = chemically synthesized
  source 1..22: mol_type = other DNA
ctcatcaaaggcctcccctgga

SEQ ID NO: 47979 - DNA, 22 bp, synthetic construct
  misc_feature 1..22: note = chemically synthesized
  source 1..22: mol_type = other DNA
atcaaaggcctcccctggagca

SEQ ID NO: 47980 - DNA, 22 bp, synthetic construct
  misc_feature 1..22: note = chemically synthesized
  source 1..22: mol_type = other DNA
ccctggagcaagaatagatggg

SEQ ID NO: 47981 - DNA, 22 bp, synthetic construct
  misc_feature 1..22: note = chemically synthesized
  source 1..22: mol_type = other DNA
gagcaagaatagatgggagcta

SEQ ID NO: 47982 - DNA, 22 bp, synthetic construct
  misc_feature 1..22: note = chemically synthesized
  source 1..22: mol_type = other DNA
actttccctgctgctccccttt

SEQ ID NO: 47983 - DNA, 22 bp, synthetic construct
  misc_feature 1..22: note = chemically synthesized
  source 1..22: mol_type = other DNA
tccctgctgctcccctttggga

SEQ ID NO: 47984 - DNA, 22 bp, synthetic construct
  misc_feature 1..22: note = chemically synthesized
  source 1..22: mol_type = other DNA
ccctgctgctcccctttgggac

SEQ ID NO: 47985 - DNA, 22 bp, synthetic construct
  misc_feature 1..22: note = chemically synthesized
  source 1..22: mol_type = other DNA
cctgctgctcccctttgggacc

SEQ ID NO: 47986 - DNA, 22 bp, synthetic construct
  misc_feature 1..22: note = chemically synthesized
  source 1..22: mol_type = other DNA
ctgctcccctttgggaccttgg

SEQ ID NO: 47987 - DNA, 22 bp, synthetic construct
  misc_feature 1..22: note = chemically synthesized
  source 1..22: mol_type = other DNA
ctcccctttgggaccttggcct

SEQ ID NO: 47988 - DNA, 22 bp, synthetic construct
  misc_feature 1..22: note = chemically synthesized
  source 1..22: mol_type = other DNA
ccctttgggaccttggcctctc

SEQ ID NO: 47989 - DNA, 22 bp, synthetic construct
  misc_feature 1..22: note = chemically synthesized
  source 1..22: mol_type = other DNA
tgggaccttggcctctcaccta

SEQ ID NO: 47990 - DNA, 22 bp, synthetic construct
  misc_feature 1..22: note = chemically synthesized
  source 1..22: mol_type = other DNA
gggaccttggcctctcacctac

SEQ ID NO: 47991 - DNA, 22 bp, synthetic construct
  misc_feature 1..22: note = chemically synthesized
  source 1..22: mol_type = other DNA
ggaccttggcctctcacctacc

SEQ ID NO: 47992 - DNA, 22 bp, synthetic construct
  misc_feature 1..22: note = chemically synthesized
  source 1..22: mol_type = other DNA
ggcctctcacctaccggggtcg

SEQ ID NO: 47993 - DNA, 22 bp, synthetic construct
  misc_feature 1..22: note = chemically synthesized
  source 1..22: mol_type = other DNA
gcctctcacctaccggggtcgt

SEQ ID NO: 47994 - DNA, 20 bp, synthetic construct
  misc_feature 1..20: note = chemically synthesized
  source 1..20: mol_type = other DNA
gtaaggctgaggcctggcac

SEQ ID NO: 47995 - DNA, 20 bp, synthetic construct
  misc_feature 1..20: note = chemically synthesized
  source 1..20: mol_type = other DNA
gcctggcacaggtctgttcc

SEQ ID NO: 47996 - DNA, 20 bp, synthetic construct
  misc_feature 1..20: note = chemically synthesized
  source 1..20: mol_type = other DNA
ggtctgttcctggtcatatc

SEQ ID NO: 47997 - DNA, 20 bp, synthetic construct
  misc_feature 1..20: note = chemically synthesized
  source 1..20: mol_type = other DNA
tctgttcctggtcatatctg

SEQ ID NO: 47998 - DNA, 20 bp, synthetic construct
  misc_feature 1..20: note = chemically synthesized
  source 1..20: mol_type = other DNA
ctgttcctggtcatatctgg

SEQ ID NO: 47999 - DNA, 20 bp, synthetic construct
  misc_feature 1..20: note = chemically synthesized
  source 1..20: mol_type = other DNA
tgttcctggtcatatctgga

SEQ ID NO: 48000 - DNA, 20 bp, synthetic construct
  misc_feature 1..20: note = chemically synthesized
  source 1..20: mol_type = other DNA
gttcctggtcatatctggag

SEQ ID NO: 48001 - DNA, 20 bp, synthetic construct
  misc_feature 1..20: note = chemically synthesized
  source 1..20: mol_type = other DNA
ctggtcatatctggagggga

SEQ ID NO: 48002 - DNA, 20 bp, synthetic construct
  misc_feature 1..20: note = chemically synthesized
  source 1..20: mol_type = other DNA
ggtcatatctggaggggatg

SEQ ID NO: 48003 - DNA, 20 bp, synthetic construct
  misc_feature 1..20: note = chemically synthesized
  source 1..20: mol_type = other DNA
ctggaggggatggagaatgt

SEQ ID NO: 48004 - DNA, 20 bp, synthetic construct
  misc_feature 1..20: note = chemically synthesized
  source 1..20: mol_type = other DNA
aggggatggagaatgtgagc

SEQ ID NO: 48005 - DNA, 20 bp, synthetic construct
  misc_feature 1..20: note = chemically synthesized
  source 1..20: mol_type = other DNA
cgttcctccccacccctctc

SEQ ID NO: 48006 - DNA, 20 bp, synthetic construct
  misc_feature 1..20: note = chemically synthesized
  source 1..20: mol_type = other DNA
gaccttaacctcctcatcta

SEQ ID NO: 48007 - DNA, 20 bp, synthetic construct
  misc_feature 1..20: note = chemically synthesized
  source 1..20: mol_type = other DNA
cttaacctcctcatctatag

SEQ ID NO: 48008 - DNA, 20 bp, synthetic construct
  misc_feature 1..20: note = chemically synthesized
  source 1..20: mol_type = other DNA
ttaacctcctcatctataga

SEQ ID NO: 48009 - DNA, 20 bp, synthetic construct
  misc_feature 1..20: note = chemically synthesized
  source 1..20: mol_type = other DNA
taacctcctcatctatagaa

SEQ ID NO: 48010 - DNA, 20 bp, synthetic construct
  misc_feature 1..20: note = chemically synthesized
  source 1..20: mol_type = other DNA
aacctcctcatctatagaag

SEQ ID NO: 48011 - DNA, 20 bp, synthetic construct
  misc_feature 1..20: note = chemically synthesized
  source 1..20: mol_type = other DNA
cctcctcatctatagaaggg

SEQ ID NO: 48012 - DNA, 20 bp, synthetic construct
  misc_feature 1..20: note = chemically synthesized
  source 1..20: mol_type = other DNA
ctcatctatagaaggggaga

SEQ ID NO: 48013 - DNA, 20 bp, synthetic construct
  misc_feature 1..20: note = chemically synthesized
  source 1..20: mol_type = other DNA
ggggagaaagatgcatgccc

SEQ ID NO: 48014 - DNA, 20 bp, synthetic construct
  misc_feature 1..20: note = chemically synthesized
  source 1..20: mol_type = other DNA
gagaaagatgcatgcccaag

SEQ ID NO: 48015 - DNA, 20 bp, synthetic construct
  misc_feature 1..20: note = chemically synthesized
  source 1..20: mol_type = other DNA
aaagatgcatgcccaagcag

SEQ ID NO: 48016 - DNA, 20 bp, synthetic construct
  misc_feature 1..20: note = chemically synthesized
  source 1..20: mol_type = other DNA
aagatgcatgcccaagcagt

SEQ ID NO: 48017 - DNA, 20 bp, synthetic construct
  misc_feature 1..20: note = chemically synthesized
  source 1..20: mol_type = other DNA
gatgcatgcccaagcagtag

SEQ ID NO: 48018 - DNA, 20 bp, synthetic construct
  misc_feature 1..20: note = chemically synthesized
  source 1..20: mol_type = other DNA
tgcatgcccaagcagtagga

SEQ ID NO: 48019 - DNA, 20 bp, synthetic construct
  misc_feature 1..20: note = chemically synthesized
  source 1..20: mol_type = other DNA
gcatgcccaagcagtaggag

SEQ ID NO: 48020 - DNA, 20 bp, synthetic construct
  misc_feature 1..20: note = chemically synthesized
  source 1..20: mol_type = other DNA
tgcccaagcagtaggagagg

SEQ ID NO: 48021 - DNA, 20 bp, synthetic construct
  misc_feature 1..20: note = chemically synthesized
  source 1..20: mol_type = other DNA
caagcagtaggagaggtggt

SEQ ID NO: 48022 - DNA, 20 bp, synthetic construct
  misc_feature 1..20: note = chemically synthesized
  source 1..20: mol_type = other DNA
aagcagtaggagaggtggtg

SEQ ID NO: 48023 - DNA, 20 bp, synthetic construct
  misc_feature 1..20: note = chemically synthesized
  source 1..20: mol_type = other DNA
aggagaggtggtgaggctta

SEQ ID NO: 48024 - DNA, 20 bp, synthetic construct
  misc_feature 1..20: note = chemically synthesized
  source 1..20: mol_type = other DNA
ggagaggtggtgaggcttat

SEQ ID NO: 48025 - DNA, 20 bp, synthetic construct
  misc_feature 1..20: note = chemically synthesized
  source 1..20: mol_type = other DNA
agaggtggtgaggcttatag

SEQ ID NO: 48026 - DNA, 20 bp, synthetic construct
  misc_feature 1..20: note = chemically synthesized
  source 1..20: mol_type = other DNA
gtgaggcttataggagacaa

SEQ ID NO: 48027 - DNA, 20 bp, synthetic construct
  misc_feature 1..20: note = chemically synthesized
  source 1..20: mol_type = other DNA
ggcttataggagacaacaga

SEQ ID NO: 48028 - DNA, 20 bp, synthetic construct
  misc_feature 1..20: note = chemically synthesized
  source 1..20: mol_type = other DNA
gcttataggagacaacagac

SEQ ID NO: 48029 - DNA, 20 bp, synthetic construct
  misc_feature 1..20: note = chemically synthesized
  source 1..20: mol_type = other DNA
ttataggagacaacagacag

SEQ ID NO: 48030 - DNA, 20 bp, synthetic construct
  misc_feature 1..20: note = chemically synthesized
  source 1..20: mol_type = other DNA
caacagacaggagcccccga

SEQ ID NO: 48031 - DNA, 20 bp, synthetic construct
  misc_feature 1..20: note = chemically synthesized
  source 1..20: mol_type = other DNA
agacaggagcccccgacaga

SEQ ID NO: 48032 - DNA, 20 bp, synthetic construct
  misc_feature 1..20: note = chemically synthesized
  source 1..20: mol_type = other DNA
acaggagcccccgacagaca

SEQ ID NO: 48033 - DNA, 20 bp, synthetic construct
  misc_feature 1..20: note = chemically synthesized
  source 1..20: mol_type = other DNA
caggagcccccgacagacag

SEQ ID NO: 48034 - DNA, 20 bp, synthetic construct
  misc_feature 1..20: note = chemically synthesized
  source 1..20: mol_type = other DNA
ggagcccccgacagacagag

SEQ ID NO: 48035 - DNA, 20 bp, synthetic construct
  misc_feature 1..20: note = chemically synthesized
  source 1..20: mol_type = other DNA
agacagaggagctgtgcaaa

SEQ ID NO: 48036 - DNA, 20 bp, synthetic construct
  misc_feature 1..20: note = chemically synthesized
  source 1..20: mol_type = other DNA
agaggagctgtgcaaacaga

SEQ ID NO: 48037 - DNA, 20 bp, synthetic construct
  misc_feature 1..20: note = chemically synthesized
  source 1..20: mol_type = other DNA
gctgtgcaaacagaaagaaa

SEQ ID NO: 48038 - DNA, 20 bp, synthetic construct
  misc_feature 1..20: note = chemically synthesized
  source 1..20: mol_type = other DNA
ttgttgctgttgctgtatct

SEQ ID NO: 48039 - DNA, 20 bp, synthetic construct
  misc_feature 1..20: note = chemically synthesized
  source 1..20: mol_type = other DNA
tgctgttgctgtatcttggc

SEQ ID NO: 48040 - DNA, 20 bp, synthetic construct
  misc_feature 1..20: note = chemically synthesized
  source 1..20: mol_type = other DNA
ttggctggtgtcccccatcc

SEQ ID NO: 48041 - DNA, 20 bp, synthetic construct
  misc_feature 1..20: note = chemically synthesized
  source 1..20: mol_type = other DNA
tggctggtgtcccccatcct

SEQ ID NO: 48042 - DNA, 20 bp, synthetic construct
  misc_feature 1..20: note = chemically synthesized
  source 1..20: mol_type = other DNA
ggctggtgtcccccatcctg

SEQ ID NO: 48043 - DNA, 20 bp, synthetic construct
  misc_feature 1..20: note = chemically synthesized
  source 1..20: mol_type = other DNA
tgtcccccatcctggggtgc

SEQ ID NO: 48044 - DNA, 20 bp, synthetic construct
  misc_feature 1..20: note = chemically synthesized
  source 1..20: mol_type = other DNA
gtcccccatcctggggtgcc

SEQ ID NO: 48045 - DNA, 20 bp, synthetic construct
  misc_feature 1..20: note = chemically synthesized
  source 1..20: mol_type = other DNA
atcctggggtgccaggactg

SEQ ID NO: 48046 - DNA, 20 bp, synthetic construct
  misc_feature 1..20: note = chemically synthesized
  source 1..20: mol_type = other DNA
gggtgccaggactgcagacc

SEQ ID NO: 48047 - DNA, 20 bp, synthetic construct
  misc_feature 1..20: note = chemically synthesized
  source 1..20: mol_type = other DNA
ccctcatccacttctgctta

SEQ ID NO: 48048 - DNA, 20 bp, synthetic construct
  misc_feature 1..20: note = chemically synthesized
  source 1..20: mol_type = other DNA
cctcatccacttctgcttac

SEQ ID NO: 48049 - DNA, 20 bp, synthetic construct
  misc_feature 1..20: note = chemically synthesized
  source 1..20: mol_type = other DNA
ccacttctgcttacaggaac

SEQ ID NO: 48050 - DNA, 20 bp, synthetic construct
  misc_feature 1..20: note = chemically synthesized
  source 1..20: mol_type = other DNA
acaggaaccagtgtatccac

SEQ ID NO: 48051 - DNA, 20 bp, synthetic construct
  misc_feature 1..20: note = chemically synthesized
  source 1..20: mol_type = other DNA
caggaaccagtgtatccacc

SEQ ID NO: 48052 - DNA, 20 bp, synthetic construct
  misc_feature 1..20: note = chemically synthesized
  source 1..20: mol_type = other DNA
ggaaccagtgtatccaccag

SEQ ID NO: 48053 - DNA, 20 bp, synthetic construct
  misc_feature 1..20: note = chemically synthesized
  source 1..20: mol_type = other DNA
gaaccagtgtatccaccagg

SEQ ID NO: 48054 - DNA, 20 bp, synthetic construct
  misc_feature 1..20: note = chemically synthesized
  source 1..20: mol_type = other DNA
tgtatccaccaggaggtacc

SEQ ID NO: 48055 - DNA, 20 bp, synthetic construct
  misc_feature 1..20: note = chemically synthesized
  source 1..20: mol_type = other DNA
gtatccaccaggaggtaccg

SEQ ID NO: 48056 - DNA, 20 bp, synthetic construct
  misc_feature 1..20: note = chemically synthesized
  source 1..20: mol_type = other DNA
tatccaccaggaggtaccga

SEQ ID NO: 48057 - DNA, 20 bp, synthetic construct
  misc_feature 1..20: note = chemically synthesized
  source 1..20: mol_type = other DNA
atccaccaggaggtaccgag

SEQ ID NO: 48058 - DNA, 20 bp, synthetic construct
  misc_feature 1..20: note = chemically synthesized
  source 1..20: mol_type = other DNA
tccaccaggaggtaccgagg

SEQ ID NO: 48059 - DNA, 20 bp, synthetic construct
  misc_feature 1..20: note = chemically synthesized
  source 1..20: mol_type = other DNA
ccaccaggaggtaccgaggg

SEQ ID NO: 48060 - DNA, 20 bp, synthetic construct
  misc_feature 1..20: note = chemically synthesized
  source 1..20: mol_type = other DNA
aggaggtaccgaggggggac

SEQ ID NO: 48061 - DNA, 20 bp, synthetic construct
  misc_feature 1..20: note = chemically synthesized
  source 1..20: mol_type = other DNA
ggaggtaccgaggggggacc

SEQ ID NO: 48062 - DNA, 20 bp, synthetic construct
  misc_feature 1..20: note = chemically synthesized
  source 1..20: mol_type = other DNA
ggtaccgaggggggaccggg

SEQ ID NO: 48063 - DNA, 20 bp, synthetic construct
  misc_feature 1..20: note = chemically synthesized
  source 1..20: mol_type = other DNA
gtaccgaggggggaccgggc

SEQ ID NO: 48064 - DNA, 20 bp, synthetic construct
  misc_feature 1..20: note = chemically synthesized
  source 1..20: mol_type = other DNA
gaggggggaccgggcaggac

SEQ ID NO: 48065 - DNA, 20 bp, synthetic construct
  misc_feature 1..20: note = chemically synthesized
  source 1..20: mol_type = other DNA
aggggggaccgggcaggact

SEQ ID NO: 48066 - DNA, 20 bp, synthetic construct
  misc_feature 1..20: note = chemically synthesized
  source 1..20: mol_type = other DNA
gaccgggcaggactgggaaa

SEQ ID NO: 48067 - DNA, 20 bp, synthetic construct
  misc_feature 1..20: note = chemically synthesized
  source 1..20: mol_type = other DNA
accgggcaggactgggaaac

SEQ ID NO: 48068 - DNA, 20 bp, synthetic construct
  misc_feature 1..20: note = chemically synthesized
  source 1..20: mol_type = other DNA
gaaacaggacacaaccctca

SEQ ID NO: 48069 - DNA, 20 bp, synthetic construct
  misc_feature 1..20: note = chemically synthesized
  source 1..20: mol_type = other DNA
ggctgctgttattatgaaaa

SEQ ID NO: 48070 - DNA, 20 bp, synthetic construct
  misc_feature 1..20: note = chemically synthesized
  source 1..20: mol_type = other DNA
gctgctgttattatgaaaat

SEQ ID NO: 48071 - DNA, 20 bp, synthetic construct
  misc_feature 1..20: note = chemically synthesized
  source 1..20: mol_type = other DNA
tgctgttattatgaaaatag

SEQ ID NO: 48072 - DNA, 20 bp, synthetic construct
  misc_feature 1..20: note = chemically synthesized
  source 1..20: mol_type = other DNA
ttattatgaaaataggagct

SEQ ID NO: 48073 - DNA, 20 bp, synthetic construct
  misc_feature 1..20: note = chemically synthesized
  source 1..20: mol_type = other DNA
tgaaaataggagctcagctg

SEQ ID NO: 48074 - DNA, 20 bp, synthetic construct
  misc_feature 1..20: note = chemically synthesized
  source 1..20: mol_type = other DNA
tctccatctgccctgcacct

SEQ ID NO: 48075 - DNA, 20 bp, synthetic construct
  misc_feature 1..20: note = chemically synthesized
  source 1..20: mol_type = other DNA
ccatctgccctgcacctcag

SEQ ID NO: 48076 - DNA, 20 bp, synthetic construct
  misc_feature 1..20: note = chemically synthesized
  source 1..20: mol_type = other DNA
catctgccctgcacctcagc

SEQ ID NO: 48077 - DNA, 20 bp, synthetic construct
  misc_feature 1..20: note = chemically synthesized
  source 1..20: mol_type = other DNA
ctgccctgcacctcagcagg

SEQ ID NO: 48078 - DNA, 20 bp, synthetic construct
  misc_feature 1..20: note = chemically synthesized
  source 1..20: mol_type = other DNA
ccacaacccccctcctgccc

SEQ ID NO: 48079 - DNA, 20 bp, synthetic construct
  misc_feature 1..20: note = chemically synthesized
  source 1..20: mol_type = other DNA
ccccagacctgctgcctgcc

SEQ ID NO: 48080 - DNA, 20 bp, synthetic construct
  misc_feature 1..20: note = chemically synthesized
  source 1..20: mol_type = other DNA
cccagacctgctgcctgcct

SEQ ID NO: 48081 - DNA, 20 bp, synthetic construct
  misc_feature 1..20: note = chemically synthesized
  source 1..20: mol_type = other DNA
cctgctgcctgcctgggcca

SEQ ID NO: 48082 - DNA, 20 bp, synthetic construct
  misc_feature 1..20: note = chemically synthesized
  source 1..20: mol_type = other DNA
ctgctgcctgcctgggccat

SEQ ID NO: 48083 - DNA, 20 bp, synthetic construct
  misc_feature 1..20: note = chemically synthesized
  source 1..20: mol_type = other DNA
tgctgcctgcctgggccatg

SEQ ID NO: 48084 - DNA, 20 bp, synthetic construct
  misc_feature 1..20: note = chemically synthesized
  source 1..20: mol_type = other DNA
ctgcctgcctgggccatggg

SEQ ID NO: 48085 - DNA, 20 bp, synthetic construct
  misc_feature 1..20: note = chemically synthesized
  source 1..20: mol_type = other DNA
tgcctgggccatggggagct

SEQ ID NO: 48086 - DNA, 20 bp, synthetic construct
  misc_feature 1..20: note = chemically synthesized
  source 1..20: mol_type = other DNA
ctgggccatggggagctcag

SEQ ID NO: 48087 - DNA, 20 bp, synthetic construct
  misc_feature 1..20: note = chemically synthesized
  source 1..20: mol_type = other DNA
ggggagctcagaagcctctc

SEQ ID NO: 48088 - DNA, 20 bp, synthetic construct
  misc_feature 1..20: note = chemically synthesized
  source 1..20: mol_type = other DNA
agcctctccagaacctctcg

SEQ ID NO: 48089 - DNA, 20 bp, synthetic construct
  misc_feature 1..20: note = chemically synthesized
  source 1..20: mol_type = other DNA
tccagaacctctcgcagtga

SEQ ID NO: 48090 - DNA, 20 bp, synthetic construct
  misc_feature 1..20: note = chemically synthesized
  source 1..20: mol_type = other DNA
ccagaacctctcgcagtgaa

SEQ ID NO: 48091 - DNA, 20 bp, synthetic construct
  misc_feature 1..20: note = chemically synthesized
  source 1..20: mol_type = other DNA
atacttacgattcactgtcc

SEQ ID NO: 48092 - DNA, 20 bp, synthetic construct
  misc_feature 1..20: note = chemically synthesized
  source 1..20: mol_type = other DNA
tacttacgattcactgtccc

SEQ ID NO: 48093 - DNA, 20 bp, synthetic construct
  misc_feature 1..20: note = chemically synthesized
  source 1..20: mol_type = other DNA
tacgattcactgtcccaggt

SEQ ID NO: 48094 - DNA, 20 bp, synthetic construct
  misc_feature 1..20: note = chemically synthesized
  source 1..20: mol_type = other DNA
gattcactgtcccaggtcag

SEQ ID NO: 48095 - DNA, 20 bp, synthetic construct
  misc_feature 1..20: note = chemically synthesized
  source 1..20: mol_type = other DNA
tcactgtcccaggtcagtgg

SEQ ID NO: 48096 - DNA, 20 bp, synthetic construct
  misc_feature 1..20: note = chemically synthesized
  source 1..20: mol_type = other DNA
caggtcagtggtggtgcctg

SEQ ID NO: 48097 - DNA, 20 bp, synthetic construct
  misc_feature 1..20: note = chemically synthesized
  source 1..20: mol_type = other DNA
cagtggtggtgcctgaagct

SEQ ID NO: 48098 - DNA, 20 bp, synthetic construct
  misc_feature 1..20: note = chemically synthesized
  source 1..20: mol_type = other DNA
agtggtggtgcctgaagctg

SEQ ID NO: 48099 - DNA, 20 bp, synthetic construct
  misc_feature 1..20: note = chemically synthesized
  source 1..20: mol_type = other DNA
tggtggtgcctgaagctgag

SEQ ID NO: 48100 - DNA, 20 bp, synthetic construct
  misc_feature 1..20: note = chemically synthesized
  source 1..20: mol_type = other DNA
ggtgcctgaagctgaggaga

SEQ ID NO: 48101 - DNA, 20 bp, synthetic construct
  misc_feature 1..20: note = chemically synthesized
  source 1..20: mol_type = other DNA
gtgcctgaagctgaggagac

SEQ ID NO: 48102 - DNA, 20 bp, synthetic construct
  misc_feature 1..20: note = chemically synthesized
  source 1..20: mol_type = other DNA
tgcctgaagctgaggagaca

SEQ ID NO: 48103 - DNA, 20 bp, synthetic construct
  misc_feature 1..20: note = chemically synthesized
  source 1..20: mol_type = other DNA
ccctgtcctcgtccgtattt

SEQ ID NO: 48104 - DNA, 20 bp, synthetic construct
  misc_feature 1..20: note = chemically synthesized
  source 1..20: mol_type = other DNA
tgtcctcgtccgtatttaag

SEQ ID NO: 48105 - DNA, 20 bp, synthetic construct
  misc_feature 1..20: note = chemically synthesized
  source 1..20: mol_type = other DNA
cctcgtccgtatttaagcag

SEQ ID NO: 48106 - DNA, 20 bp, synthetic construct
  misc_feature 1..20: note = chemically synthesized
  source 1..20: mol_type = other DNA
ccgtatttaagcagtggatc

SEQ ID NO: 48107 - DNA, 20 bp, synthetic construct
  misc_feature 1..20: note = chemically synthesized
  source 1..20: mol_type = other DNA
gtatttaagcagtggatcca

SEQ ID NO: 48108 - DNA, 20 bp, synthetic construct
  misc_feature 1..20: note = chemically synthesized
  source 1..20: mol_type = other DNA
tatttaagcagtggatccag

SEQ ID NO: 48109 - DNA, 20 bp, synthetic construct
  misc_feature 1..20: note = chemically synthesized
  source 1..20: mol_type = other DNA
atttaagcagtggatccaga

SEQ ID NO: 48110 - DNA, 20 bp, synthetic construct
  misc_feature 1..20: note = chemically synthesized
  source 1..20: mol_type = other DNA
tttaagcagtggatccagag

SEQ ID NO: 48111 - DNA, 20 bp, synthetic construct
  misc_feature 1..20: note = chemically synthesized
  source 1..20: mol_type = other DNA
cagtggatccagaggggcaa

SEQ ID NO: 48112 - DNA, 20 bp, synthetic construct
  misc_feature 1..20: note = chemically synthesized
  source 1..20: mol_type = other DNA
agtggatccagaggggcaac

SEQ ID NO: 48113 - DNA, 20 bp, synthetic construct
  misc_feature 1..20: note = chemically synthesized
  source 1..20: mol_type = other DNA
gtggatccagaggggcaacg

SEQ ID NO: 48114 - DNA, 20 bp, synthetic construct
  misc_feature 1..20: note = chemically synthesized
  source 1..20: mol_type = other DNA
tggatccagaggggcaacgg

SEQ ID NO: 48115 - DNA, 20 bp, synthetic construct
  misc_feature 1..20: note = chemically synthesized
  source 1..20: mol_type = other DNA
gatccagaggggcaacgggg

SEQ ID NO: 48116 - DNA, 20 bp, synthetic construct
  misc_feature 1..20: note = chemically synthesized
  source 1..20: mol_type = other DNA
atccagaggggcaacggggg

SEQ ID NO: 48117 - DNA, 20 bp, synthetic construct
  misc_feature 1..20: note = chemically synthesized
  source 1..20: mol_type = other DNA
ggggcaacgggggaggctgc

SEQ ID NO: 48118 - DNA, 20 bp, synthetic construct
  misc_feature 1..20: note = chemically synthesized
  source 1..20: mol_type = other DNA
gctgctggtgaatattaacc

SEQ ID NO: 48119 - DNA, 20 bp, synthetic construct
  misc_feature 1..20: note = chemically synthesized
  source 1..20: mol_type = other DNA
ctgctggtgaatattaacca

SEQ ID NO: 48120 - DNA, 20 bp, synthetic construct
  misc_feature 1..20: note = chemically synthesized
  source 1..20: mol_type = other DNA
aatattaaccaaggtcaccc

SEQ ID NO: 48121 - DNA, 20 bp, synthetic construct
  misc_feature 1..20: note = chemically synthesized
  source 1..20: mol_type = other DNA
accaaggtcaccccagttat

SEQ ID NO: 48122 - DNA, 20 bp, synthetic construct
  misc_feature 1..20: note = chemically synthesized
  source 1..20: mol_type = other DNA
caaggtcaccccagttatcg

SEQ ID NO: 48123 - DNA, 20 bp, synthetic construct
  misc_feature 1..20: note = chemically synthesized
  source 1..20: mol_type = other DNA
aaggtcaccccagttatcgg

SEQ ID NO: 48124 - DNA, 20 bp, synthetic construct
  misc_feature 1..20: note = chemically synthesized
  source 1..20: mol_type = other DNA
ggtcaccccagttatcggag

SEQ ID NO: 48125 - DNA, 20 bp, synthetic construct
  misc_feature 1..20: note = chemically synthesized
  source 1..20: mol_type = other DNA
ccagttatcggaggagcaaa

SEQ ID NO: 48126 - DNA, 20 bp, synthetic construct
  misc_feature 1..20: note = chemically synthesized
  source 1..20: mol_type = other DNA
cagttatcggaggagcaaac

SEQ ID NO: 48127 - DNA, 20 bp, synthetic construct
  misc_feature 1..20: note = chemically synthesized
  source 1..20: mol_type = other DNA
agttatcggaggagcaaaca

SEQ ID NO: 48128 - DNA, 20 bp, synthetic construct
  misc_feature 1..20: note = chemically synthesized
  source 1..20: mol_type = other DNA
gttatcggaggagcaaacag

SEQ ID NO: 48129 - DNA, 20 bp, synthetic construct
  misc_feature 1..20: note = chemically synthesized
  source 1..20: mol_type = other DNA
cggaggagcaaacaggggct

SEQ ID NO: 48130 - DNA, 20 bp, synthetic construct
  misc_feature 1..20: note = chemically synthesized
  source 1..20: mol_type = other DNA
caaacaggggctaagtccac

SEQ ID NO: 48131 - DNA, 20 bp, synthetic construct
  misc_feature 1..20: note = chemically synthesized
  source 1..20: mol_type = other DNA
caggggctaagtccactggc

SEQ ID NO: 48132 - DNA, 20 bp, synthetic construct
  misc_feature 1..20: note = chemically synthesized
  source 1..20: mol_type = other DNA
aggggctaagtccactggct

SEQ ID NO: 48133 - DNA, 20 bp, synthetic construct
  misc_feature 1..20: note = chemically synthesized
  source 1..20: mol_type = other DNA
aagtccactggctgggatct

SEQ ID NO: 48134 - DNA, 20 bp, synthetic construct
  misc_feature 1..20: note = chemically synthesized
  source 1..20: mol_type = other DNA
agtcgcccgcctacgctgcc

SEQ ID NO: 48135 - DNA, 20 bp, synthetic construct
  misc_feature 1..20: note = chemically synthesized
  source 1..20: mol_type = other DNA
cgctgcccggacgctttgcc

SEQ ID NO: 48136 - DNA, 20 bp, synthetic construct
  misc_feature 1..20: note = chemically synthesized
  source 1..20: mol_type = other DNA
gctgcccggacgctttgcct

SEQ ID NO: 48137 - DNA, 20 bp, synthetic construct
  misc_feature 1..20: note = chemically synthesized
  source 1..20: mol_type = other DNA
gcccggacgctttgcctggg

SEQ ID NO: 48138 - DNA, 20 bp, synthetic construct
  misc_feature 1..20: note = chemically synthesized
  source 1..20: mol_type = other DNA
cgctttgcctgggcagtgta

SEQ ID NO: 48139 - DNA, 20 bp, synthetic construct
  misc_feature 1..20: note = chemically synthesized
  source 1..20: mol_type = other DNA
gcttccactgcacttaccga

SEQ ID NO: 48140 - DNA, 20 bp, synthetic construct
  misc_feature 1..20: note = chemically synthesized
  source 1..20: mol_type = other DNA
cttccactgcacttaccgaa

SEQ ID NO: 48141 - DNA, 20 bp, synthetic construct
  misc_feature 1..20: note = chemically synthesized
  source 1..20: mol_type = other DNA
tccactgcacttaccgaaag

SEQ ID NO: 48142 - DNA, 20 bp, synthetic construct
  misc_feature 1..20: note = chemically synthesized
  source 1..20: mol_type = other DNA
ccgaaaggagtcattgtacc

SEQ ID NO: 48143 - DNA, 20 bp, synthetic construct
  misc_feature 1..20: note = chemically synthesized
  source 1..20: mol_type = other DNA
aggagtcattgtacctggct

SEQ ID NO: 48144 - DNA, 20 bp, synthetic construct
  misc_feature 1..20: note = chemically synthesized
  source 1..20: mol_type = other DNA
tgtacctggctcagaaacca

SEQ ID NO: 48145 - DNA, 20 bp, synthetic construct
  misc_feature 1..20: note = chemically synthesized
  source 1..20: mol_type = other DNA
aaccacagcgtcctgtgtcc

SEQ ID NO: 48146 - DNA, 20 bp, synthetic construct
  misc_feature 1..20: note = chemically synthesized
  source 1..20: mol_type = other DNA
accacagcgtcctgtgtcca

SEQ ID NO: 48147 - DNA, 20 bp, synthetic construct
  misc_feature 1..20: note = chemically synthesized
  source 1..20: mol_type = other DNA
acagcgtcctgtgtccaagg

SEQ ID NO: 48148 - DNA, 20 bp, synthetic construct
  misc_feature 1..20: note = chemically synthesized
  source 1..20: mol_type = other DNA
agcgtcctgtgtccaaggtg

SEQ ID NO: 48149 - DNA, 20 bp, synthetic construct
  misc_feature 1..20: note = chemically synthesized
  source 1..20: mol_type = other DNA
gcgtcctgtgtccaaggtgg

SEQ ID NO: 48150 - DNA, 20 bp, synthetic construct
  misc_feature 1..20: note = chemically synthesized
  source 1..20: mol_type = other DNA
cgtcctgtgtccaaggtgga

SEQ ID NO: 48151 - DNA, 20 bp, synthetic construct
  misc_feature 1..20: note = chemically synthesized
  source 1..20: mol_type = other DNA
gtcctgtgtccaaggtggag

SEQ ID NO: 48152 - DNA, 20 bp, synthetic construct
  misc_feature 1..20: note = chemically synthesized
  source 1..20: mol_type = other DNA
tcctgtgtccaaggtggagg

SEQ ID NO: 48153 - DNA, 20 bp, synthetic construct
  misc_feature 1..20: note = chemically synthesized
  source 1..20: mol_type = other DNA
tgtgtccaaggtggaggggg

SEQ ID NO: 48154 - DNA, 20 bp, synthetic construct
  misc_feature 1..20: note = chemically synthesized
  source 1..20: mol_type = other DNA
caaggtggagggggtggcgt

SEQ ID NO: 48155 - DNA, 20 bp, synthetic construct
  misc_feature 1..20: note = chemically synthesized
  source 1..20: mol_type = other DNA
gtggagggggtggcgtgagt

SEQ ID NO: 48156 - DNA, 20 bp, synthetic construct
  misc_feature 1..20: note = chemically synthesized
  source 1..20: mol_type = other DNA
agggggtggcgtgagtcaga

SEQ ID NO: 48157 - DNA, 20 bp, synthetic construct
  misc_feature 1..20: note = chemically synthesized
  source 1..20: mol_type = other DNA
ggcgtgagtcagacagtctc

SEQ ID NO: 48158 - DNA, 20 bp, synthetic construct
  misc_feature 1..20: note = chemically synthesized
  source 1..20: mol_type = other DNA
gcgtgagtcagacagtctct

SEQ ID NO: 48159 - DNA, 20 bp, synthetic construct
  misc_feature 1..20: note = chemically synthesized
  source 1..20: mol_type = other DNA
gtgagtcagacagtctctgg

SEQ ID NO: 48160 - DNA, 20 bp, synthetic construct
  misc_feature 1..20: note = chemically synthesized
  source 1..20: mol_type = other DNA
gagtcagacagtctctggga

SEQ ID NO: 48161 - DNA, 20 bp, synthetic construct
  misc_feature 1..20: note = chemically synthesized
  source 1..20: mol_type = other DNA
gtctctgggagagtaccact

SEQ ID NO: 48162 - DNA, 20 bp, synthetic construct
  misc_feature 1..20: note = chemically synthesized
  source 1..20: mol_type = other DNA
ctgggagagtaccacttagc

SEQ ID NO: 48163 - DNA, 20 bp, synthetic construct
  misc_feature 1..20: note = chemically synthesized
  source 1..20: mol_type = other DNA
ctggccctctgctctcactg

SEQ ID NO: 48164 - DNA, 20 bp, synthetic construct
  misc_feature 1..20: note = chemically synthesized
  source 1..20: mol_type = other DNA
tgctctcactgcagaatcct

SEQ ID NO: 48165 - DNA, 20 bp, synthetic construct
  misc_feature 1..20: note = chemically synthesized
  source 1..20: mol_type = other DNA
tctcactgcagaatccttag

SEQ ID NO: 48166 - DNA, 20 bp, synthetic construct
  misc_feature 1..20: note = chemically synthesized
  source 1..20: mol_type = other DNA
atccttagtggctgttccac

SEQ ID NO: 48167 - DNA, 20 bp, synthetic construct
  misc_feature 1..20: note = chemically synthesized
  source 1..20: mol_type = other DNA
cttagtggctgttccactgg

SEQ ID NO: 48168 - DNA, 20 bp, synthetic construct
  misc_feature 1..20: note = chemically synthesized
  source 1..20: mol_type = other DNA
gtggctgttccactggtagc

SEQ ID NO: 48169 - DNA, 20 bp, synthetic construct
  misc_feature 1..20: note = chemically synthesized
  source 1..20: mol_type = other DNA
agcaagatctaccatttact

SEQ ID NO: 48170 - DNA, 20 bp, synthetic construct
  misc_feature 1..20: note = chemically synthesized
  source 1..20: mol_type = other DNA
ccccaaaatgcctgatgctg

SEQ ID NO: 48171 - DNA, 20 bp, synthetic construct
  misc_feature 1..20: note = chemically synthesized
  source 1..20: mol_type = other DNA
ctgaagacttactgccgccc

SEQ ID NO: 48172 - DNA, 20 bp, synthetic construct
  misc_feature 1..20: note = chemically synthesized
  source 1..20: mol_type = other DNA
tgaagacttactgccgccct

SEQ ID NO: 48173 - DNA, 20 bp, synthetic construct
  misc_feature 1..20: note = chemically synthesized
  source 1..20: mol_type = other DNA
aagacttactgccgccctgg

SEQ ID NO: 48174 - DNA, 20 bp, synthetic construct
  misc_feature 1..20: note = chemically synthesized
  source 1..20: mol_type = other DNA
ttactgccgccctgggagat

SEQ ID NO: 48175 - DNA, 20 bp, synthetic construct
  misc_feature 1..20: note = chemically synthesized
  source 1..20: mol_type = other DNA
actgccgccctgggagatca

SEQ ID NO: 48176 - DNA, 20 bp, synthetic construct
  misc_feature 1..20: note = chemically synthesized
  source 1..20: mol_type = other DNA
gccgccctgggagatcagag

SEQ ID NO: 48177 - DNA, 20 bp, synthetic construct
  misc_feature 1..20: note = chemically synthesized
  source 1..20: mol_type = other DNA
ccgccctgggagatcagagt

SEQ ID NO: 48178 - DNA, 20 bp, synthetic construct
  misc_feature 1..20: note = chemically synthesized
  source 1..20: mol_type = other DNA
cctgggagatcagagtgggt

SEQ ID NO: 48179 - DNA, 20 bp, synthetic construct
  misc_feature 1..20: note = chemically synthesized
  source 1..20: mol_type = other DNA
tgggagatcagagtgggtta

SEQ ID NO: 48180 - DNA, 20 bp, synthetic construct
  misc_feature 1..20: note = chemically synthesized
  source 1..20: mol_type = other DNA
gtgggttagagcccatttga

SEQ ID NO: 48181 - DNA, 20 bp, synthetic construct
  misc_feature 1..20: note = chemically synthesized
  source 1..20: mol_type = other DNA
ttagagcccatttgacagat

SEQ ID NO: 48182 - DNA, 20 bp, synthetic construct
  misc_feature 1..20: note = chemically synthesized
  source 1..20: mol_type = other DNA
tagagcccatttgacagatg

SEQ ID NO: 48183 - DNA, 20 bp, synthetic construct
  misc_feature 1..20: note = chemically synthesized
  source 1..20: mol_type = other DNA
ccatttgacagatgaggaaa

SEQ ID NO: 48184 - DNA, 20 bp, synthetic construct
  misc_feature 1..20: note = chemically synthesized
  source 1..20: mol_type = other DNA
catttgacagatgaggaaac

SEQ ID NO: 48185 - DNA, 20 bp, synthetic construct
  misc_feature 1..20: note = chemically synthesized
  source 1..20: mol_type = other DNA
gacagatgaggaaacaggct

SEQ ID NO: 48186 - DNA, 20 bp, synthetic construct
  misc_feature 1..20: note = chemically synthesized
  source 1..20: mol_type = other DNA
cagatgaggaaacaggctca

SEQ ID NO: 48187 - DNA, 20 bp, synthetic construct
  misc_feature 1..20: note = chemically synthesized
  source 1..20: mol_type = other DNA
atgaggaaacaggctcagag

SEQ ID NO: 48188 - DNA, 20 bp, synthetic construct
  misc_feature 1..20: note = chemically synthesized
  source 1..20: mol_type = other DNA
gaggaaacaggctcagagcg

SEQ ID NO: 48189 - DNA, 20 bp, synthetic construct
  misc_feature 1..20: note = chemically synthesized
  source 1..20: mol_type = other DNA
ggaaacaggctcagagcgga

SEQ ID NO: 48190 - DNA, 20 bp, synthetic construct
  misc_feature 1..20: note = chemically synthesized
  source 1..20: mol_type = other DNA
gcggagagaccgctcatcca

SEQ ID NO: 48191 - DNA, 20 bp, synthetic construct
  misc_feature 1..20: note = chemically synthesized
  source 1..20: mol_type = other DNA
accgctcatccaaagttacc

SEQ ID NO: 48192 - DNA, 20 bp, synthetic construct
  misc_feature 1..20: note = chemically synthesized
  source 1..20: mol_type = other DNA
ctcatccaaagttacccagt

SEQ ID NO: 48193 - DNA, 20 bp, synthetic construct
  misc_feature 1..20: note = chemically synthesized
  source 1..20: mol_type = other DNA
caaagttacccagtcagcct

SEQ ID NO: 48194 - DNA, 20 bp, synthetic construct
  misc_feature 1..20: note = chemically synthesized
  source 1..20: mol_type = other DNA
agacacaaacaccctcttga

SEQ ID NO: 48195 - DNA, 20 bp, synthetic construct
  misc_feature 1..20: note = chemically synthesized
  source 1..20: mol_type = other DNA
caccctcttgatggtcccga

SEQ ID NO: 48196 - DNA, 20 bp, synthetic construct
  misc_feature 1..20: note = chemically synthesized
  source 1..20: mol_type = other DNA
tgatggtcccgatggaaaaa

SEQ ID NO: 48197 - DNA, 20 bp, synthetic construct
  misc_feature 1..20: note = chemically synthesized
  source 1..20: mol_type = other DNA
atggtcccgatggaaaaatg

SEQ ID NO: 48198 - DNA, 20 bp, synthetic construct
  misc_feature 1..20: note = chemically synthesized
  source 1..20: mol_type = other DNA
tggaaaaatggagcatgact

SEQ ID NO: 48199 - DNA, 20 bp, synthetic construct
  misc_feature 1..20: note = chemically synthesized
  source 1..20: mol_type = other DNA
ggaaaaatggagcatgactg

SEQ ID NO: 48200 - DNA, 20 bp, synthetic construct
  misc_feature 1..20: note = chemically synthesized
  source 1..20: mol_type = other DNA
aaaatggagcatgactgagg

SEQ ID NO: 48201 - DNA, 20 bp, synthetic construct
  misc_feature 1..20: note = chemically synthesized
  source 1..20: mol_type = other DNA
actgaggcagacacaaccgt

SEQ ID NO: 48202 - DNA, 20 bp, synthetic construct
  misc_feature 1..20: note = chemically synthesized
  source 1..20: mol_type = other DNA
ctgaggcagacacaaccgtc

SEQ ID NO: 48203 - DNA, 20 bp, synthetic construct
  misc_feature 1..20: note = chemically synthesized
  source 1..20: mol_type = other DNA
ggcagacacaaccgtcaggc

SEQ ID NO: 48204 - DNA, 20 bp, synthetic construct
  misc_feature 1..20: note = chemically synthesized
  source 1..20: mol_type = other DNA
acacaaccgtcaggctggca

SEQ ID NO: 48205 - DNA, 20 bp, synthetic construct
  misc_feature 1..20: note = chemically synthesized
  source 1..20: mol_type = other DNA
cacaaccgtcaggctggcat

SEQ ID NO: 48206 - DNA, 20 bp, synthetic construct
  misc_feature 1..20: note = chemically synthesized
  source 1..20: mol_type = other DNA
acaaccgtcaggctggcatg

SEQ ID NO: 48207 - DNA, 20 bp, synthetic construct
  misc_feature 1..20: note = chemically synthesized
  source 1..20: mol_type = other DNA
caaccgtcaggctggcatgg

SEQ ID NO: 48208 - DNA, 20 bp, synthetic construct
  misc_feature 1..20: note = chemically synthesized
  source 1..20: mol_type = other DNA
aaccgtcaggctggcatggg

SEQ ID NO: 48209 - DNA, 20 bp, synthetic construct
  misc_feature 1..20: note = chemically synthesized
  source 1..20: mol_type = other DNA
aggctggcatggggggccgt

SEQ ID NO: 48210 - DNA, 20 bp, synthetic construct
  misc_feature 1..20: note = chemically synthesized
  source 1..20: mol_type = other DNA
tggcatggggggccgtgaga

SEQ ID NO: 48211 - DNA, 20 bp, synthetic construct
  misc_feature 1..20: note = chemically synthesized
  source 1..20: mol_type = other DNA
ggcatggggggccgtgagac

SEQ ID NO: 48212 - DNA, 20 bp, synthetic construct
  misc_feature 1..20: note = chemically synthesized
  source 1..20: mol_type = other DNA
gcatggggggccgtgagaca

SEQ ID NO: 48213 - DNA, 20 bp, synthetic construct
  misc_feature 1..20: note = chemically synthesized
  source 1..20: mol_type = other DNA
tggggggccgtgagacaggg

SEQ ID NO: 48214 - DNA, 20 bp, synthetic construct
  misc_feature 1..20: note = chemically synthesized
  source 1..20: mol_type = other DNA
gggggccgtgagacagggta

SEQ ID NO: 48215 - DNA, 20 bp, synthetic construct
  misc_feature 1..20: note = chemically synthesized
  source 1..20: mol_type = other DNA
ggggccgtgagacagggtag

SEQ ID NO: 48216 - DNA, 20 bp, synthetic construct
  misc_feature 1..20: note = chemically synthesized
  source 1..20: mol_type = other DNA
gccgtgagacagggtagagg

SEQ ID NO: 48217 - DNA, 20 bp, synthetic construct
  misc_feature 1..20: note = chemically synthesized
  source 1..20: mol_type = other DNA
ccgtgagacagggtagaggt

SEQ ID NO: 48218 - DNA, 20 bp, synthetic construct
  misc_feature 1..20: note = chemically synthesized
  source 1..20: mol_type = other DNA
cgtgagacagggtagaggtg

SEQ ID NO: 48219 - DNA, 20 bp, synthetic construct
  misc_feature 1..20: note = chemically synthesized
  source 1..20: mol_type = other DNA
gagacagggtagaggtgggg

SEQ ID NO: 48220 - DNA, 20 bp, synthetic construct
  misc_feature 1..20: note = chemically synthesized
  source 1..20: mol_type = other DNA
ggtggggaagcacatctgta

SEQ ID NO: 48221 - DNA, 20 bp, synthetic construct
  misc_feature 1..20: note = chemically synthesized
  source 1..20: mol_type = other DNA
ggggaagcacatctgtaaag

SEQ ID NO: 48222 - DNA, 20 bp, synthetic construct
  misc_feature 1..20: note = chemically synthesized
  source 1..20: mol_type = other DNA
ggaagcacatctgtaaagaa

SEQ ID NO: 48223 - DNA, 20 bp, synthetic construct
  misc_feature 1..20: note = chemically synthesized
  source 1..20: mol_type = other DNA
aaagaagagctgtgctgcct

SEQ ID NO: 48224 - DNA, 20 bp, synthetic construct
  misc_feature 1..20: note = chemically synthesized
  source 1..20: mol_type = other DNA
aagaagagctgtgctgcctc

SEQ ID NO: 48225 - DNA, 20 bp, synthetic construct
  misc_feature 1..20: note = chemically synthesized
  source 1..20: mol_type = other DNA
aagagctgtgctgcctcagg

SEQ ID NO: 48226 - DNA, 20 bp, synthetic construct
  misc_feature 1..20: note = chemically synthesized
  source 1..20: mol_type = other DNA
agagctgtgctgcctcaggc

SEQ ID NO: 48227 - DNA, 20 bp, synthetic construct
  misc_feature 1..20: note = chemically synthesized
  source 1..20: mol_type = other DNA
gccgcttcacctctctgaac

SEQ ID NO: 48228 - DNA, 20 bp, synthetic construct
  misc_feature 1..20: note = chemically synthesized
  source 1..20: mol_type = other DNA
ccgcttcacctctctgaacc

SEQ ID NO: 48229 - DNA, 20 bp, synthetic construct
  misc_feature 1..20: note = chemically synthesized
  source 1..20: mol_type = other DNA
actgtttcacctgcatccca

SEQ ID NO: 48230 - DNA, 20 bp, synthetic construct
  misc_feature 1..20: note = chemically synthesized
  source 1..20: mol_type = other DNA
tgtttcacctgcatcccaaa

SEQ ID NO: 48231 - DNA, 20 bp, synthetic construct
  misc_feature 1..20: note = chemically synthesized
  source 1..20: mol_type = other DNA
tcacctgcatcccaaagagt

SEQ ID NO: 48232 - DNA, 20 bp, synthetic construct
  misc_feature 1..20: note = chemically synthesized
  source 1..20: mol_type = other DNA
cctgcatcccaaagagttgg

SEQ ID NO: 48233 - DNA, 20 bp, synthetic construct
  misc_feature 1..20: note = chemically synthesized
  source 1..20: mol_type = other DNA
gagttggaagtttcattccc

SEQ ID NO: 48234 - DNA, 20 bp, synthetic construct
  misc_feature 1..20: note = chemically synthesized
  source 1..20: mol_type = other DNA
cattcccaagcatgcttgtg

SEQ ID NO: 48235 - DNA, 20 bp, synthetic construct
  misc_feature 1..20: note = chemically synthesized
  source 1..20: mol_type = other DNA
agcatgcttgtgaagtgcct

SEQ ID NO: 48236 - DNA, 20 bp, synthetic construct
  misc_feature 1..20: note = chemically synthesized
  source 1..20: mol_type = other DNA
gcatgcttgtgaagtgcctc

SEQ ID NO: 48237 - DNA, 20 bp, synthetic construct
  misc_feature 1..20: note = chemically synthesized
  source 1..20: mol_type = other DNA
cttgtgaagtgcctcgggtg

SEQ ID NO: 48238 - DNA, 20 bp, synthetic construct
  misc_feature 1..20: note = chemically synthesized
  source 1..20: mol_type = other DNA
agtgcctcgggtgaagtgcc

SEQ ID NO: 48239 - DNA, 20 bp, synthetic construct
  misc_feature 1..20: note = chemically synthesized
  source 1..20: mol_type = other DNA
cgggtgaagtgcctggcaca

SEQ ID NO: 48240 - DNA, 20 bp, synthetic construct
  misc_feature 1..20: note = chemically synthesized
  source 1..20: mol_type = other DNA
gtgaagtgcctggcacacag

SEQ ID NO: 48241 - DNA, 20 bp, synthetic construct
  misc_feature 1..20: note = chemically synthesized
  source 1..20: mol_type = other DNA
tgaagtgcctggcacacagt

SEQ ID NO: 48242 - DNA, 20 bp, synthetic construct
  misc_feature 1..20: note = chemically synthesized
  source 1..20: mol_type = other DNA
cacacagtaggctctttatg

SEQ ID NO: 48243 - DNA, 20 bp, synthetic construct
  misc_feature 1..20: note = chemically synthesized
  source 1..20: mol_type = other DNA
acacagtaggctctttatgt

SEQ ID NO: 48244 - DNA, 20 bp, synthetic construct
  misc_feature 1..20: note = chemically synthesized
  source 1..20: mol_type = other DNA
gctctttatgtgggtctgca

SEQ ID NO: 48245 - DNA, 20 bp, synthetic construct
  misc_feature 1..20: note = chemically synthesized
  source 1..20: mol_type = other DNA
ggtctgcacagccctctgct

SEQ ID NO: 48246 - DNA, 20 bp, synthetic construct
  misc_feature 1..20: note = chemically synthesized
  source 1..20: mol_type = other DNA
cctctgcttagtctgccccc

SEQ ID NO: 48247 - DNA, 20 bp, synthetic construct
  misc_feature 1..20: note = chemically synthesized
  source 1..20: mol_type = other DNA
ctctgcttagtctgcccccc

SEQ ID NO: 48248 - DNA, 20 bp, synthetic construct
  misc_feature 1..20: note = chemically synthesized
  source 1..20: mol_type = other DNA
agtctgccccccaggctgct

SEQ ID NO: 48249 - DNA, 20 bp, synthetic construct
  misc_feature 1..20: note = chemically synthesized
  source 1..20: mol_type = other DNA
tctgccccccaggctgctca

SEQ ID NO: 48250 - DNA, 20 bp, synthetic construct
  misc_feature 1..20: note = chemically synthesized
  source 1..20: mol_type = other DNA
gccccccaggctgctcagag

SEQ ID NO: 48251 - DNA, 20 bp, synthetic construct
  misc_feature 1..20: note = chemically synthesized
  source 1..20: mol_type = other DNA
ccccccaggctgctcagagc

SEQ ID NO: 48252 - DNA, 20 bp, synthetic construct
  misc_feature 1..20: note = chemically synthesized
  source 1..20: mol_type = other DNA
ccccaggctgctcagagcag

SEQ ID NO: 48253 - DNA, 20 bp, synthetic construct
  misc_feature 1..20: note = chemically synthesized
  source 1..20: mol_type = other DNA
cccaggctgctcagagcagg

SEQ ID NO: 48254 - DNA, 20 bp, synthetic construct
  misc_feature 1..20: note = chemically synthesized
  source 1..20: mol_type = other DNA
caggctgctcagagcaggag

SEQ ID NO: 48255 - DNA, 20 bp, synthetic construct
  misc_feature 1..20: note = chemically synthesized
  source 1..20: mol_type = other DNA
aggctgctcagagcaggagg

SEQ ID NO: 48256 - DNA, 20 bp, synthetic construct
  misc_feature 1..20: note = chemically synthesized
  source 1..20: mol_type = other DNA
ggaggaggttcaattttgac

SEQ ID NO: 48257 - DNA, 20 bp, synthetic construct
  misc_feature 1..20: note = chemically synthesized
  source 1..20: mol_type = other DNA
ggttcaattttgaccagcct

SEQ ID NO: 48258 - DNA, 20 bp, synthetic construct
  misc_feature 1..20: note = chemically synthesized
  source 1..20: mol_type = other DNA
gttcaattttgaccagcctc

SEQ ID NO: 48259 - DNA, 20 bp, synthetic construct
  misc_feature 1..20: note = chemically synthesized
  source 1..20: mol_type = other DNA
cctgtttctgtttttgctcc

SEQ ID NO: 48260 - DNA, 20 bp, synthetic construct
  misc_feature 1..20: note = chemically synthesized
  source 1..20: mol_type = other DNA
tgtttttgctcctggaaaac

SEQ ID NO: 48261 - DNA, 20 bp, synthetic construct
  misc_feature 1..20: note = chemically synthesized
  source 1..20: mol_type = other DNA
aaaccagtgtgatccgtata

SEQ ID NO: 48262 - DNA, 20 bp, synthetic construct
  misc_feature 1..20: note = chemically synthesized
  source 1..20: mol_type = other DNA
agtgtgatccgtatacagct

SEQ ID NO: 48263 - DNA, 20 bp, synthetic construct
  misc_feature 1..20: note = chemically synthesized
  source 1..20: mol_type = other DNA
tgtgatccgtatacagcttg

SEQ ID NO: 48264 - DNA, 20 bp, synthetic construct
  misc_feature 1..20: note = chemically synthesized
  source 1..20: mol_type = other DNA
tatacagcttggagtttctt

SEQ ID NO: 48265 - DNA, 20 bp, synthetic construct
  misc_feature 1..20: note = chemically synthesized
  source 1..20: mol_type = other DNA
ttggagtttctttggataca

SEQ ID NO: 48266 - DNA, 20 bp, synthetic construct
  misc_feature 1..20: note = chemically synthesized
  source 1..20: mol_type = other DNA
tggatacatggcccccactc

SEQ ID NO: 48267 - DNA, 20 bp, synthetic construct
  misc_feature 1..20: note = chemically synthesized
  source 1..20: mol_type = other DNA
ggatacatggcccccactct

SEQ ID NO: 48268 - DNA, 20 bp, synthetic construct
  misc_feature 1..20: note = chemically synthesized
  source 1..20: mol_type = other DNA
gatacatggcccccactctg

SEQ ID NO: 48269 - DNA, 20 bp, synthetic construct
  misc_feature 1..20: note = chemically synthesized
  source 1..20: mol_type = other DNA
ggcccccactctggggttgt

SEQ ID NO: 48270 - DNA, 20 bp, synthetic construct
  misc_feature 1..20: note = chemically synthesized
  source 1..20: mol_type = other DNA
cccccactctggggttgttg

SEQ ID NO: 48271 - DNA, 20 bp, synthetic construct
  misc_feature 1..20: note = chemically synthesized
  source 1..20: mol_type = other DNA
ccccactctggggttgttgg

SEQ ID NO: 48272 - DNA, 20 bp, synthetic construct
  misc_feature 1..20: note = chemically synthesized
  source 1..20: mol_type = other DNA
ctggggttgttggaggcctt

SEQ ID NO: 48273 - DNA, 20 bp, synthetic construct
  misc_feature 1..20: note = chemically synthesized
  source 1..20: mol_type = other DNA
ggggttgttggaggcctttg

SEQ ID NO: 48274 - DNA, 20 bp, synthetic construct
  misc_feature 1..20: note = chemically synthesized
  source 1..20: mol_type = other DNA
tggaggcctttggagactgc

SEQ ID NO: 48275 - DNA, 20 bp, synthetic construct
  misc_feature 1..20: note = chemically synthesized
  source 1..20: mol_type = other DNA
ggaggcctttggagactgct

SEQ ID NO: 48276 - DNA, 20 bp, synthetic construct
  misc_feature 1..20: note = chemically synthesized
  source 1..20: mol_type = other DNA
gaggcctttggagactgctg

SEQ ID NO: 48277 - DNA, 20 bp, synthetic construct
  misc_feature 1..20: note = chemically synthesized
  source 1..20: mol_type = other DNA
aggcctttggagactgctgg

SEQ ID NO: 48278 - DNA, 20 bp, synthetic construct
  misc_feature 1..20: note = chemically synthesized
  source 1..20: mol_type = other DNA
cctttggagactgctggggg

SEQ ID NO: 48279 - DNA, 20 bp, synthetic construct
  misc_feature 1..20: note = chemically synthesized
  source 1..20: mol_type = other DNA
tttggagactgctgggggtg

SEQ ID NO: 48280 - DNA, 20 bp, synthetic construct
  misc_feature 1..20: note = chemically synthesized
  source 1..20: mol_type = other DNA
ttggagactgctgggggtgg

SEQ ID NO: 48281 - DNA, 20 bp, synthetic construct
  misc_feature 1..20: note = chemically synthesized
  source 1..20: mol_type = other DNA
tggagactgctgggggtgga

SEQ ID NO: 48282 - DNA, 20 bp, synthetic construct
  misc_feature 1..20: note = chemically synthesized
  source 1..20: mol_type = other DNA
ggagactgctgggggtggag

SEQ ID NO: 48283 - DNA, 20 bp, synthetic construct
  misc_feature 1..20: note = chemically synthesized
  source 1..20: mol_type = other DNA
agactgctgggggtggaggg

SEQ ID NO: 48284 - DNA, 20 bp, synthetic construct
  misc_feature 1..20: note = chemically synthesized
  source 1..20: mol_type = other DNA
gactgctgggggtggagggg

SEQ ID NO: 48285 - DNA, 20 bp, synthetic construct
  misc_feature 1..20: note = chemically synthesized
  source 1..20: mol_type = other DNA
actgctgggggtggagggga

SEQ ID NO: 48286 - DNA, 20 bp, synthetic construct
  misc_feature 1..20: note = chemically synthesized
  source 1..20: mol_type = other DNA
ctgctgggggtggaggggag

SEQ ID NO: 48287 - DNA, 20 bp, synthetic construct
  misc_feature 1..20: note = chemically synthesized
  source 1..20: mol_type = other DNA
gctgggggtggaggggaggg

SEQ ID NO: 48288 - DNA, 20 bp, synthetic construct
  misc_feature 1..20: note = chemically synthesized
  source 1..20: mol_type = other DNA
ctgggggtggaggggagggg

SEQ ID NO: 48289 - DNA, 20 bp, synthetic construct
  misc_feature 1..20: note = chemically synthesized
  source 1..20: mol_type = other DNA
ggtggaggggaggggaggta

SEQ ID NO: 48290 - DNA, 20 bp, synthetic construct
  misc_feature 1..20: note = chemically synthesized
  source 1..20: mol_type = other DNA
gtggaggggaggggaggtac

SEQ ID NO: 48291 - DNA, 20 bp, synthetic construct
  misc_feature 1..20: note = chemically synthesized
  source 1..20: mol_type = other DNA
tggaggggaggggaggtaca

SEQ ID NO: 48292 - DNA, 20 bp, synthetic construct
  misc_feature 1..20: note = chemically synthesized
  source 1..20: mol_type = other DNA
gggaggggaggtacagggtt

SEQ ID NO: 48293 - DNA, 20 bp, synthetic construct
  misc_feature 1..20: note = chemically synthesized
  source 1..20: mol_type = other DNA
ggaggggaggtacagggttg

SEQ ID NO: 48294 - DNA, 20 bp, synthetic construct
  misc_feature 1..20: note = chemically synthesized
  source 1..20: mol_type = other DNA
gggaggtacagggttgaggc

SEQ ID NO: 48295 - DNA, 20 bp, synthetic construct
  misc_feature 1..20: note = chemically synthesized
  source 1..20: mol_type = other DNA
aggtacagggttgaggctag

SEQ ID NO: 48296 - DNA, 20 bp, synthetic construct
  misc_feature 1..20: note = chemically synthesized
  source 1..20: mol_type = other DNA
ggtacagggttgaggctagt

SEQ ID NO: 48297 - DNA, 20 bp, synthetic construct
  misc_feature 1..20: note = chemically synthesized
  source 1..20: mol_type = other DNA
gtacagggttgaggctagtg

SEQ ID NO: 48298 - DNA, 20 bp, synthetic construct
  misc_feature 1..20: note = chemically synthesized
  source 1..20: mol_type = other DNA
cttgattgcaatccctttaa

SEQ ID NO: 48299 - DNA, 20 bp, synthetic construct
  misc_feature 1..20: note = chemically synthesized
  source 1..20: mol_type = other DNA
atccctttaaaagcctaaat

SEQ ID NO: 48300 - DNA, 20 bp, synthetic construct
  misc_feature 1..20: note = chemically synthesized
  source 1..20: mol_type = other DNA
gtgcaacccgcaaacctgct

SEQ ID NO: 48301 - DNA, 20 bp, synthetic construct
  misc_feature 1..20: note = chemically synthesized
  source 1..20: mol_type = other DNA
tgcaacccgcaaacctgctt

SEQ ID NO: 48302 - DNA, 20 bp, synthetic construct
  misc_feature 1..20: note = chemically synthesized
  source 1..20: mol_type = other DNA
caacccgcaaacctgcttgg

SEQ ID NO: 48303 - DNA, 20 bp, synthetic construct
  misc_feature 1..20: note = chemically synthesized
  source 1..20: mol_type = other DNA
ccgcaaacctgcttgggagc

SEQ ID NO: 48304 - DNA, 20 bp, synthetic construct
  misc_feature 1..20: note = chemically synthesized
  source 1..20: mol_type = other DNA
gggagctggcgtacgtgccg

SEQ ID NO: 48305 - DNA, 20 bp, synthetic construct
  misc_feature 1..20: note = chemically synthesized
  source 1..20: mol_type = other DNA
gtacgtgccgtagatacttg

SEQ ID NO: 48306 - DNA, 20 bp, synthetic construct
  misc_feature 1..20: note = chemically synthesized
  source 1..20: mol_type = other DNA
acgtgccgtagatacttgca

SEQ ID NO: 48307 - DNA, 20 bp, synthetic construct
  misc_feature 1..20: note = chemically synthesized
  source 1..20: mol_type = other DNA
gtagatacttgcagagtgaa

SEQ ID NO: 48308 - DNA, 20 bp, synthetic construct
  misc_feature 1..20: note = chemically synthesized
  source 1..20: mol_type = other DNA
tacttgcagagtgaatggat

SEQ ID NO: 48309 - DNA, 20 bp, synthetic construct
  misc_feature 1..20: note = chemically synthesized
  source 1..20: mol_type = other DNA
ttgccccttctgtcattcac

SEQ ID NO: 48310 - DNA, 20 bp, synthetic construct
  misc_feature 1..20: note = chemically synthesized
  source 1..20: mol_type = other DNA
tcccatttatgcctccacct

SEQ ID NO: 48311 - DNA, 20 bp, synthetic construct
  misc_feature 1..20: note = chemically synthesized
  source 1..20: mol_type = other DNA
cccatttatgcctccacctt

SEQ ID NO: 48312 - DNA, 20 bp, synthetic construct
  misc_feature 1..20: note = chemically synthesized
  source 1..20: mol_type = other DNA
ccatttatgcctccaccttg

SEQ ID NO: 48313 - DNA, 20 bp, synthetic construct
  misc_feature 1..20: note = chemically synthesized
  source 1..20: mol_type = other DNA
cctccaccttggggctctac

SEQ ID NO: 48314 - DNA, 20 bp, synthetic construct
  misc_feature 1..20: note = chemically synthesized
  source 1..20: mol_type = other DNA
ctccaccttggggctctacc

SEQ ID NO: 48315 - DNA, 20 bp, synthetic construct
  misc_feature 1..20: note = chemically synthesized
  source 1..20: mol_type = other DNA
accttggggctctaccaggc

SEQ ID NO: 48316 - DNA, 20 bp, synthetic construct
  misc_feature 1..20: note = chemically synthesized
  source 1..20: mol_type = other DNA
tctaccaggcgagtgaccca

SEQ ID NO: 48317 - DNA, 20 bp, synthetic construct
  misc_feature 1..20: note = chemically synthesized
  source 1..20: mol_type = other DNA
ctaccaggcgagtgacccac

SEQ ID NO: 48318 - DNA, 20 bp, synthetic construct
  misc_feature 1..20: note = chemically synthesized
  source 1..20: mol_type = other DNA
gagtgacccacaggatcctc

SEQ ID NO: 48319 - DNA, 20 bp, synthetic construct
  misc_feature 1..20: note = chemically synthesized
  source 1..20: mol_type = other DNA
gatcctccagcacacacatt

SEQ ID NO: 48320 - DNA, 20 bp, synthetic construct
  misc_feature 1..20: note = chemically synthesized
  source 1..20: mol_type = other DNA
tccagcacacacattcagac

SEQ ID NO: 48321 - DNA, 20 bp, synthetic construct
  misc_feature 1..20: note = chemically synthesized
  source 1..20: mol_type = other DNA
ccagcacacacattcagacc

SEQ ID NO: 48322 - DNA, 20 bp, synthetic construct
  misc_feature 1..20: note = chemically synthesized
  source 1..20: mol_type = other DNA
cagcacacacattcagacca

SEQ ID NO: 48323 - DNA, 20 bp, synthetic construct
  misc_feature 1..20: note = chemically synthesized
  source 1..20: mol_type = other DNA
agaccagggaacccacttac

SEQ ID NO: 48324 - DNA, 20 bp, synthetic construct
  misc_feature 1..20: note = chemically synthesized
  source 1..20: mol_type = other DNA
ggaacccacttactggctgt

SEQ ID NO: 48325 - DNA, 20 bp, synthetic construct
  misc_feature 1..20: note = chemically synthesized
  source 1..20: mol_type = other DNA
gaacccacttactggctgtg

SEQ ID NO: 48326 - DNA, 20 bp, synthetic construct
  misc_feature 1..20: note = chemically synthesized
  source 1..20: mol_type = other DNA
acttactggctgtgaggcct

SEQ ID NO: 48327 - DNA, 20 bp, synthetic construct
  misc_feature 1..20: note = chemically synthesized
  source 1..20: mol_type = other DNA
cttactggctgtgaggcctc

SEQ ID NO: 48328 - DNA, 20 bp, synthetic construct
  misc_feature 1..20: note = chemically synthesized
  source 1..20: mol_type = other DNA
ctggctgtgaggcctcaggt

SEQ ID NO: 48329 - DNA, 20 bp, synthetic construct
  misc_feature 1..20: note = chemically synthesized
  source 1..20: mol_type = other DNA
gtgagttgtttaaccgctcc

SEQ ID NO: 48330 - DNA, 20 bp, synthetic construct
  misc_feature 1..20: note = chemically synthesized
  source 1..20: mol_type = other DNA
caatttccctatctgtaaaa

SEQ ID NO: 48331 - DNA, 20 bp, synthetic construct
  misc_feature 1..20: note = chemically synthesized
  source 1..20: mol_type = other DNA
aatttccctatctgtaaaat

SEQ ID NO: 48332 - DNA, 20 bp, synthetic construct
  misc_feature 1..20: note = chemically synthesized
  source 1..20: mol_type = other DNA
atttccctatctgtaaaatg

SEQ ID NO: 48333 - DNA, 20 bp, synthetic construct
  misc_feature 1..20: note = chemically synthesized
  source 1..20: mol_type = other DNA
ccctatctgtaaaatgggga

SEQ ID NO: 48334 - DNA, 20 bp, synthetic construct
  misc_feature 1..20: note = chemically synthesized
  source 1..20: mol_type = other DNA
ctgtaaaatggggatggtga

SEQ ID NO: 48335 - DNA, 20 bp, synthetic construct
  misc_feature 1..20: note = chemically synthesized
  source 1..20: mol_type = other DNA
gtgacggtatgtaccttgtt

SEQ ID NO: 48336 - DNA, 20 bp, synthetic construct
  misc_feature 1..20: note = chemically synthesized
  source 1..20: mol_type = other DNA
gtaccttgttgagctgctgt

SEQ ID NO: 48337 - DNA, 20 bp, synthetic construct
  misc_feature 1..20: note = chemically synthesized
  source 1..20: mol_type = other DNA
taccttgttgagctgctgtg

SEQ ID NO: 48338 - DNA, 20 bp, synthetic construct
  misc_feature 1..20: note = chemically synthesized
  source 1..20: mol_type = other DNA
ctgtgaggattaaaatgcaa

SEQ ID NO: 48339 - DNA, 20 bp, synthetic construct
  misc_feature 1..20: note = chemically synthesized
  source 1..20: mol_type = other DNA
ggattaaaatgcaacagttc

SEQ ID NO: 48340 - DNA, 20 bp, synthetic construct
  misc_feature 1..20: note = chemically synthesized
  source 1..20: mol_type = other DNA
gattaaaatgcaacagttca

SEQ ID NO: 48341 - DNA, 20 bp, synthetic construct
  misc_feature 1..20: note = chemically synthesized
  source 1..20: mol_type = other DNA
aaaatgcaacagttcaagga

SEQ ID NO: 48342 - DNA, 20 bp, synthetic construct
  misc_feature 1..20: note = chemically synthesized
  source 1..20: mol_type = other DNA
gcaacagttcaaggaaagct

SEQ ID NO: 48343 - DNA, 20 bp, synthetic construct
  misc_feature 1..20: note = chemically synthesized
  source 1..20: mol_type = other DNA
aacagttcaaggaaagctca

SEQ ID NO: 48344 - DNA, 20 bp, synthetic construct
  misc_feature 1..20: note = chemically synthesized
  source 1..20: mol_type = other DNA
gttcaaggaaagctcagaga

SEQ ID NO: 48345 - DNA, 20 bp, synthetic construct
  misc_feature 1..20: note = chemically synthesized
  source 1..20: mol_type = other DNA
ttcaaggaaagctcagagac

SEQ ID NO: 48346 - DNA, 20 bp, synthetic construct
  misc_feature 1..20: note = chemically synthesized
  source 1..20: mol_type = other DNA
gaaagctcagagacgggtac

SEQ ID NO: 48347 - DNA, 20 bp, synthetic construct
  misc_feature 1..20: note = chemically synthesized
  source 1..20: mol_type = other DNA
aaagctcagagacgggtact

SEQ ID NO: 48348 - DNA, 20 bp, synthetic construct
  misc_feature 1..20: note = chemically synthesized
  source 1..20: mol_type = other DNA
agacgggtactgggtgtgcc

SEQ ID NO: 48349 - DNA, 20 bp, synthetic construct
  misc_feature 1..20: note = chemically synthesized
  source 1..20: mol_type = other DNA
gggtactgggtgtgcccaga

SEQ ID NO: 48350 - DNA, 20 bp, synthetic construct
  misc_feature 1..20: note = chemically synthesized
  source 1..20: mol_type = other DNA
ctgccctccctcccccgtgt

SEQ ID NO: 48351 - DNA, 20 bp, synthetic construct
  misc_feature 1..20: note = chemically synthesized
  source 1..20: mol_type = other DNA
tgccctccctcccccgtgtc

SEQ ID NO: 48352 - DNA, 20 bp, synthetic construct
  misc_feature 1..20: note = chemically synthesized
  source 1..20: mol_type = other DNA
gccctccctcccccgtgtca

SEQ ID NO: 48353 - DNA, 20 bp, synthetic construct
  misc_feature 1..20: note = chemically synthesized
  source 1..20: mol_type = other DNA
ccctccctcccccgtgtcag

SEQ ID NO: 48354 - DNA, 20 bp, synthetic construct
  misc_feature 1..20: note = chemically synthesized
  source 1..20: mol_type = other DNA
ccctcccccgtgtcaggggc

SEQ ID NO: 48355 - DNA, 20 bp, synthetic construct
  misc_feature 1..20: note = chemically synthesized
  source 1..20: mol_type = other DNA
gtgtcaggggctggtgtcac

SEQ ID NO: 48356 - DNA, 20 bp, synthetic construct
  misc_feature 1..20: note = chemically synthesized
  source 1..20: mol_type = other DNA
tgtcaggggctggtgtcact

SEQ ID NO: 48357 - DNA, 20 bp, synthetic construct
  misc_feature 1..20: note = chemically synthesized
  source 1..20: mol_type = other DNA
gtcaggggctggtgtcactg

SEQ ID NO: 48358 - DNA, 20 bp, synthetic construct
  misc_feature 1..20: note = chemically synthesized
  source 1..20: mol_type = other DNA
aggggctggtgtcactgggg

SEQ ID NO: 48359 - DNA, 20 bp, synthetic construct
  misc_feature 1..20: note = chemically synthesized
  source 1..20: mol_type = other DNA
ggggctggtgtcactggggt

SEQ ID NO: 48360 - DNA, 20 bp, synthetic construct
  misc_feature 1..20: note = chemically synthesized
  source 1..20: mol_type = other DNA
gggctggtgtcactggggtg

SEQ ID NO: 48361 - DNA, 20 bp, synthetic construct
  misc_feature 1..20: note = chemically synthesized
  source 1..20: mol_type = other DNA
ctggtgtcactggggtgggg

SEQ ID NO: 48362 - DNA, 20 bp, synthetic construct
  misc_feature 1..20: note = chemically synthesized
  source 1..20: mol_type = other DNA
tggtgtcactggggtggggt

SEQ ID NO: 48363 - DNA, 20 bp, synthetic construct
  misc_feature 1..20: note = chemically synthesized
  source 1..20: mol_type = other DNA
ggtggggtgggccacacttg

SEQ ID NO: 48364 - DNA, 20 bp, synthetic construct
  misc_feature 1..20: note = chemically synthesized
  source 1..20: mol_type = other DNA
tggggtgggccacacttgaa

SEQ ID NO: 48365 - DNA, 20 bp, synthetic construct
  misc_feature 1..20: note = chemically synthesized
  source 1..20: mol_type = other DNA
acacttgaagagctttcctc

SEQ ID NO: 48366 - DNA, 20 bp, synthetic construct
  misc_feature 1..20: note = chemically synthesized
  source 1..20: mol_type = other DNA
cacttgaagagctttcctcc

SEQ ID NO: 48367 - DNA, 20 bp, synthetic construct
  misc_feature 1..20: note = chemically synthesized
  source 1..20: mol_type = other DNA
ttgaagagctttcctccagg

SEQ ID NO: 48368 - DNA, 20 bp, synthetic construct
  misc_feature 1..20: note = chemically synthesized
  source 1..20: mol_type = other DNA
cctccaggcagtctctcatt

SEQ ID NO: 48369 - DNA, 20 bp, synthetic construct
  misc_feature 1..20: note = chemically synthesized
  source 1..20: mol_type = other DNA
tctcattcagttaccctgtg

SEQ ID NO: 48370 - DNA, 20 bp, synthetic construct
  misc_feature 1..20: note = chemically synthesized
  source 1..20: mol_type = other DNA
ctcattcagttaccctgtga

SEQ ID NO: 48371 - DNA, 20 bp, synthetic construct
  misc_feature 1..20: note = chemically synthesized
  source 1..20: mol_type = other DNA
tcattcagttaccctgtgaa

SEQ ID NO: 48372 - DNA, 20 bp, synthetic construct
  misc_feature 1..20: note = chemically synthesized
  source 1..20: mol_type = other DNA
attcagttaccctgtgaagg

SEQ ID NO: 48373 - DNA, 20 bp, synthetic construct
  misc_feature 1..20: note = chemically synthesized
  source 1..20: mol_type = other DNA
cagttaccctgtgaagggag

SEQ ID NO: 48374 - DNA, 20 bp, synthetic construct
  misc_feature 1..20: note = chemically synthesized
  source 1..20: mol_type = other DNA
agttaccctgtgaagggagt

SEQ ID NO: 48375 - DNA, 20 bp, synthetic construct
  misc_feature 1..20: note = chemically synthesized
  source 1..20: mol_type = other DNA
agtaggtaccaccctccttt

SEQ ID NO: 48376 - DNA, 20 bp, synthetic construct
  misc_feature 1..20: note = chemically synthesized
  source 1..20: mol_type = other DNA
gtaggtaccaccctcctttc

SEQ ID NO: 48377 - DNA, 20 bp, synthetic construct
  misc_feature 1..20: note = chemically synthesized
  source 1..20: mol_type = other DNA
ggtaccaccctcctttcagg

SEQ ID NO: 48378 - DNA, 20 bp, synthetic construct
  misc_feature 1..20: note = chemically synthesized
  source 1..20: mol_type = other DNA
accaccctcctttcaggcag

SEQ ID NO: 48379 - DNA, 20 bp, synthetic construct
  misc_feature 1..20: note = chemically synthesized
  source 1..20: mol_type = other DNA
ccaccctcctttcaggcagc

SEQ ID NO: 48380 - DNA, 20 bp, synthetic construct
  misc_feature 1..20: note = chemically synthesized
  source 1..20: mol_type = other DNA
ctttcaggcagcgggaaact

SEQ ID NO: 48381 - DNA, 20 bp, synthetic construct
  misc_feature 1..20: note = chemically synthesized
  source 1..20: mol_type = other DNA
aggcagcgggaaactgagct

SEQ ID NO: 48382 - DNA, 20 bp, synthetic construct
  misc_feature 1..20: note = chemically synthesized
  source 1..20: mol_type = other DNA
actcccctccccttctctct

SEQ ID NO: 48383 - DNA, 20 bp, synthetic construct
  misc_feature 1..20: note = chemically synthesized
  source 1..20: mol_type = other DNA
tctctgagctcccttccctg

SEQ ID NO: 48384 - DNA, 20 bp, synthetic construct
  misc_feature 1..20: note = chemically synthesized
  source 1..20: mol_type = other DNA
ttccctgcagctccatcccc

SEQ ID NO: 48385 - DNA, 20 bp, synthetic construct
  misc_feature 1..20: note = chemically synthesized
  source 1..20: mol_type = other DNA
gcagctccatcccctggctt

SEQ ID NO: 48386 - DNA, 20 bp, synthetic construct
  misc_feature 1..20: note = chemically synthesized
  source 1..20: mol_type = other DNA
cagctccatcccctggcttc

SEQ ID NO: 48387 - DNA, 20 bp, synthetic construct
  misc_feature 1..20: note = chemically synthesized
  source 1..20: mol_type = other DNA
agctccatcccctggcttca

SEQ ID NO: 48388 - DNA, 20 bp, synthetic construct
  misc_feature 1..20: note = chemically synthesized
  source 1..20: mol_type = other DNA
agggcccctgtccttcccct

SEQ ID NO: 48389 - DNA, 20 bp, synthetic construct
  misc_feature 1..20: note = chemically synthesized
  source 1..20: mol_type = other DNA
cccctgtccttcccctgagc

SEQ ID NO: 48390 - DNA, 20 bp, synthetic construct
  misc_feature 1..20: note = chemically synthesized
  source 1..20: mol_type = other DNA
cttcccctgagctggctgaa

SEQ ID NO: 48391 - DNA, 20 bp, synthetic construct
  misc_feature 1..20: note = chemically synthesized
  source 1..20: mol_type = other DNA
cgctgctctacatccactca

SEQ ID NO: 48392 - DNA, 20 bp, synthetic construct
  misc_feature 1..20: note = chemically synthesized
  source 1..20: mol_type = other DNA
tctacatccactcacagctc

SEQ ID NO: 48393 - DNA, 20 bp, synthetic construct
  misc_feature 1..20: note = chemically synthesized
  source 1..20: mol_type = other DNA
tccactcacagctccagcac

SEQ ID NO: 48394 - DNA, 20 bp, synthetic construct
  misc_feature 1..20: note = chemically synthesized
  source 1..20: mol_type = other DNA
ccactcacagctccagcact

SEQ ID NO: 48395 - DNA, 20 bp, synthetic construct
  misc_feature 1..20: note = chemically synthesized
  source 1..20: mol_type = other DNA
acagctccagcactgggctg

SEQ ID NO: 48396 - DNA, 20 bp, synthetic construct
  misc_feature 1..20: note = chemically synthesized
  source 1..20: mol_type = other DNA
tccagcactgggctgtggtt

SEQ ID NO: 48397 - DNA, 20 bp, synthetic construct
  misc_feature 1..20: note = chemically synthesized
  source 1..20: mol_type = other DNA
ccagcactgggctgtggttg

SEQ ID NO: 48398 - DNA, 20 bp, synthetic construct
  misc_feature 1..20: note = chemically synthesized
  source 1..20: mol_type = other DNA
tggttgaggtcgcctgccct

SEQ ID NO: 48399 - DNA, 20 bp, synthetic construct
  misc_feature 1..20: note = chemically synthesized
  source 1..20: mol_type = other DNA
ttgaggtcgcctgccctcgg

SEQ ID NO: 48400 - DNA, 20 bp, synthetic construct
  misc_feature 1..20: note = chemically synthesized
  source 1..20: mol_type = other DNA
cgcctgccctcggtagctcc

SEQ ID NO: 48401 - DNA, 20 bp, synthetic construct
  misc_feature 1..20: note = chemically synthesized
  source 1..20: mol_type = other DNA
gcctgccctcggtagctcct

SEQ ID NO: 48402 - DNA, 20 bp, synthetic construct
  misc_feature 1..20: note = chemically synthesized
  source 1..20: mol_type = other DNA
tgggcatttcttcccctctc

SEQ ID NO: 48403 - DNA, 20 bp, synthetic construct
  misc_feature 1..20: note = chemically synthesized
  source 1..20: mol_type = other DNA
gggcatttcttcccctctct

SEQ ID NO: 48404 - DNA, 20 bp, synthetic construct
  misc_feature 1..20: note = chemically synthesized
  source 1..20: mol_type = other DNA
tgcacaatgacccccactct

SEQ ID NO: 48405 - DNA, 20 bp, synthetic construct
  misc_feature 1..20: note = chemically synthesized
  source 1..20: mol_type = other DNA
cctgctgtccctcccacctg

SEQ ID NO: 48406 - DNA, 20 bp, synthetic construct
  misc_feature 1..20: note = chemically synthesized
  source 1..20: mol_type = other DNA
tccctcccacctgtggaact

SEQ ID NO: 48407 - DNA, 20 bp, synthetic construct
  misc_feature 1..20: note = chemically synthesized
  source 1..20: mol_type = other DNA
tcccacctgtggaactgagt

SEQ ID NO: 48408 - DNA, 20 bp, synthetic construct
  misc_feature 1..20: note = chemically synthesized
  source 1..20: mol_type = other DNA
cacctgtggaactgagtgag

SEQ ID NO: 48409 - DNA, 20 bp, synthetic construct
  misc_feature 1..20: note = chemically synthesized
  source 1..20: mol_type = other DNA
ctgtggaactgagtgagcag

SEQ ID NO: 48410 - DNA, 20 bp, synthetic construct
  misc_feature 1..20: note = chemically synthesized
  source 1..20: mol_type = other DNA
tggaactgagtgagcagcag

SEQ ID NO: 48411 - DNA, 20 bp, synthetic construct
  misc_feature 1..20: note = chemically synthesized
  source 1..20: mol_type = other DNA
ccacctttcctgctctcctc

SEQ ID NO: 48412 - DNA, 20 bp, synthetic construct
  misc_feature 1..20: note = chemically synthesized
  source 1..20: mol_type = other DNA
gctctcctcaagctctcctc

SEQ ID NO: 48413 - DNA, 20 bp, synthetic construct
  misc_feature 1..20: note = chemically synthesized
  source 1..20: mol_type = other DNA
tcctcaagctctgtctcttc

SEQ ID NO: 48414 - DNA, 20 bp, synthetic construct
  misc_feature 1..20: note = chemically synthesized
  source 1..20: mol_type = other DNA
tcaagctctgtctcttctgg

SEQ ID NO: 48415 - DNA, 20 bp, synthetic construct
  misc_feature 1..20: note = chemically synthesized
  source 1..20: mol_type = other DNA
caagctctgtctcttctggc

SEQ ID NO: 48416 - DNA, 20 bp, synthetic construct
  misc_feature 1..20: note = chemically synthesized
  source 1..20: mol_type = other DNA
tctgtctcttctggcaggca

SEQ ID NO: 48417 - DNA, 20 bp, synthetic construct
  misc_feature 1..20: note = chemically synthesized
  source 1..20: mol_type = other DNA
ctgtctcttctggcaggcac

SEQ ID NO: 48418 - DNA, 20 bp, synthetic construct
  misc_feature 1..20: note = chemically synthesized
  source 1..20: mol_type = other DNA
gtctcttctggcaggcacag

SEQ ID NO: 48419 - DNA, 20 bp, synthetic construct
  misc_feature 1..20: note = chemically synthesized
  source 1..20: mol_type = other DNA
ctcttctggcaggcacagga

SEQ ID NO: 48420 - DNA, 20 bp, synthetic construct
  misc_feature 1..20: note = chemically synthesized
  source 1..20: mol_type = other DNA
ttctggcaggcacaggagag

SEQ ID NO: 48421 - DNA, 20 bp, synthetic construct
  misc_feature 1..20: note = chemically synthesized
  source 1..20: mol_type = other DNA
aggcacaggagagtggcctg

SEQ ID NO: 48422 - DNA, 20 bp, synthetic construct
  misc_feature 1..20: note = chemically synthesized
  source 1..20: mol_type = other DNA
ggcacaggagagtggcctga

SEQ ID NO: 48423 - DNA, 20 bp, synthetic construct
  misc_feature 1..20: note = chemically synthesized
  source 1..20: mol_type = other DNA
caggagagtggcctgaaggc

SEQ ID NO: 48424 - DNA, 20 bp, synthetic construct
  misc_feature 1..20: note = chemically synthesized
  source 1..20: mol_type = other DNA
gagagtggcctgaaggctgg

SEQ ID NO: 48425 - DNA, 20 bp, synthetic construct
  misc_feature 1..20: note = chemically synthesized
  source 1..20: mol_type = other DNA
agagtggcctgaaggctggc

SEQ ID NO: 48426 - DNA, 20 bp, synthetic construct
  misc_feature 1..20: note = chemically synthesized
  source 1..20: mol_type = other DNA
agtggcctgaaggctggcag

SEQ ID NO: 48427 - DNA, 20 bp, synthetic construct
  misc_feature 1..20: note = chemically synthesized
  source 1..20: mol_type = other DNA
gtggcctgaaggctggcagg

SEQ ID NO: 48428 - DNA, 20 bp, synthetic construct
  misc_feature 1..20: note = chemically synthesized
  source 1..20: mol_type = other DNA
aggttgccgcccctccaacc

SEQ ID NO: 48429 - DNA, 20 bp, synthetic construct
  misc_feature 1..20: note = chemically synthesized
  source 1..20: mol_type = other DNA
cccctccaacctggaattcc

SEQ ID NO: 48430 - DNA, 20 bp, synthetic construct
  misc_feature 1..20: note = chemically synthesized
  source 1..20: mol_type = other DNA
ctccaacctggaattcctgg

SEQ ID NO: 48431 - DNA, 20 bp, synthetic construct
  misc_feature 1..20: note = chemically synthesized
  source 1..20: mol_type = other DNA
caacctggaattcctggcag

SEQ ID NO: 48432 - DNA, 20 bp, synthetic construct
  misc_feature 1..20: note = chemically synthesized
  source 1..20: mol_type = other DNA
cctggaattcctggcagcag

SEQ ID NO: 48433 - DNA, 20 bp, synthetic construct
  misc_feature 1..20: note = chemically synthesized
  source 1..20: mol_type = other DNA
ggaattcctggcagcagcag

SEQ ID NO: 48434 - DNA, 20 bp, synthetic construct
  misc_feature 1..20: note = chemically synthesized
  source 1..20: mol_type = other DNA
ttcctggcagcagcagcggc

SEQ ID NO: 48435 - DNA, 20 bp, synthetic construct
  misc_feature 1..20: note = chemically synthesized
  source 1..20: mol_type = other DNA
tcctggcagcagcagcggct

SEQ ID NO: 48436 - DNA, 20 bp, synthetic construct
  misc_feature 1..20: note = chemically synthesized
  source 1..20: mol_type = other DNA
agcagcggctaggccttcct

SEQ ID NO: 48437 - DNA, 20 bp, synthetic construct
  misc_feature 1..20: note = chemically synthesized
  source 1..20: mol_type = other DNA
cagcggctaggccttcctcg

SEQ ID NO: 48438 - DNA, 20 bp, synthetic construct
  misc_feature 1..20: note = chemically synthesized
  source 1..20: mol_type = other DNA
agcggctaggccttcctcgg

SEQ ID NO: 48439 - DNA, 20 bp, synthetic construct
  misc_feature 1..20: note = chemically synthesized
  source 1..20: mol_type = other DNA
cccgaccccctcctccttct

SEQ ID NO: 48440 - DNA, 20 bp, synthetic construct
  misc_feature 1..20: note = chemically synthesized
  source 1..20: mol_type = other DNA
ccccctcctccttcttggtt

SEQ ID NO: 48441 - DNA, 20 bp, synthetic construct
  misc_feature 1..20: note = chemically synthesized
  source 1..20: mol_type = other DNA
tcctccttcttggttcagct

SEQ ID NO: 48442 - DNA, 20 bp, synthetic construct
  misc_feature 1..20: note = chemically synthesized
  source 1..20: mol_type = other DNA
cctccttcttggttcagctc

SEQ ID NO: 48443 - DNA, 20 bp, synthetic construct
  misc_feature 1..20: note = chemically synthesized
  source 1..20: mol_type = other DNA
ttggttcagctcaggactct

SEQ ID NO: 48444 - DNA, 20 bp, synthetic construct
  misc_feature 1..20: note = chemically synthesized
  source 1..20: mol_type = other DNA
tggttcagctcaggactctg

SEQ ID NO: 48445 - DNA, 20 bp, synthetic construct
  misc_feature 1..20: note = chemically synthesized
  source 1..20: mol_type = other DNA
ggttcagctcaggactctga

SEQ ID NO: 48446 - DNA, 20 bp, synthetic construct
  misc_feature 1..20: note = chemically synthesized
  source 1..20: mol_type = other DNA
ggactctgagggttgctgcg

SEQ ID NO: 48447 - DNA, 20 bp, synthetic construct
  misc_feature 1..20: note = chemically synthesized
  source 1..20: mol_type = other DNA
actctgagggttgctgcgtg

SEQ ID NO: 48448 - DNA, 20 bp, synthetic construct
  misc_feature 1..20: note = chemically synthesized
  source 1..20: mol_type = other DNA
ctctgagggttgctgcgtgg

SEQ ID NO: 48449 - DNA, 20 bp, synthetic construct
  misc_feature 1..20: note = chemically synthesized
  source 1..20: mol_type = other DNA
tgagggttgctgcgtggagg

SEQ ID NO: 48450 - DNA, 20 bp, synthetic construct
  misc_feature 1..20: note = chemically synthesized
  source 1..20: mol_type = other DNA
cgtggaggcagtgcatgccc

SEQ ID NO: 48451 - DNA, 20 bp, synthetic construct
  misc_feature 1..20: note = chemically synthesized
  source 1..20: mol_type = other DNA
gtggaggcagtgcatgccct

SEQ ID NO: 48452 - DNA, 20 bp, synthetic construct
  misc_feature 1..20: note = chemically synthesized
  source 1..20: mol_type = other DNA
ggcagtgcatgccctgggca

SEQ ID NO: 48453 - DNA, 20 bp, synthetic construct
  misc_feature 1..20: note = chemically synthesized
  source 1..20: mol_type = other DNA
catgccctgggcacagtgcc

SEQ ID NO: 48454 - DNA, 20 bp, synthetic construct
  misc_feature 1..20: note = chemically synthesized
  source 1..20: mol_type = other DNA
gtgcccagttcctgcccacc

SEQ ID NO: 48455 - DNA, 20 bp, synthetic construct
  misc_feature 1..20: note = chemically synthesized
  source 1..20: mol_type = other DNA
tgcccagttcctgcccaccc

SEQ ID NO: 48456 - DNA, 20 bp, synthetic construct
  misc_feature 1..20: note = chemically synthesized
  source 1..20: mol_type = other DNA
ccagttcctgcccacccagg

SEQ ID NO: 48457 - DNA, 20 bp, synthetic construct
  misc_feature 1..20: note = chemically synthesized
  source 1..20: mol_type = other DNA
gttcctgcccacccaggaag

SEQ ID NO: 48458 - DNA, 20 bp, synthetic construct
  misc_feature 1..20: note = chemically synthesized
  source 1..20: mol_type = other DNA
cccacccaggaagtagactt

SEQ ID NO: 48459 - DNA, 20 bp, synthetic construct
  misc_feature 1..20: note = chemically synthesized
  source 1..20: mol_type = other DNA
ccacccaggaagtagacttc

SEQ ID NO: 48460 - DNA, 20 bp, synthetic construct
  misc_feature 1..20: note = chemically synthesized
  source 1..20: mol_type = other DNA
cccaggaagtagacttcggg

SEQ ID NO: 48461 - DNA, 20 bp, synthetic construct
  misc_feature 1..20: note = chemically synthesized
  source 1..20: mol_type = other DNA
caggaagtagacttcgggtg

SEQ ID NO: 48462 - DNA, 20 bp, synthetic construct
  misc_feature 1..20: note = chemically synthesized
  source 1..20: mol_type = other DNA
aggaagtagacttcgggtgg

SEQ ID NO: 48463 - DNA, 20 bp, synthetic construct
  misc_feature 1..20: note = chemically synthesized
  source 1..20: mol_type = other DNA
aagtagacttcgggtggagg

SEQ ID NO: 48464 - DNA, 20 bp, synthetic construct
  misc_feature 1..20: note = chemically synthesized
  source 1..20: mol_type = other DNA
tagacttcgggtggaggcag

SEQ ID NO: 48465 - DNA, 20 bp, synthetic construct
  misc_feature 1..20: note = chemically synthesized
  source 1..20: mol_type = other DNA
agacttcgggtggaggcagt

SEQ ID NO: 48466 - DNA, 20 bp, synthetic construct
  misc_feature 1..20: note = chemically synthesized
  source 1..20: mol_type = other DNA
ttcgggtggaggcagtaggc

SEQ ID NO: 48467 - DNA, 20 bp, synthetic construct
  misc_feature 1..20: note = chemically synthesized
  source 1..20: mol_type = other DNA
tcgggtggaggcagtaggct

SEQ ID NO: 48468 - DNA, 20 bp, synthetic construct
  misc_feature 1..20: note = chemically synthesized
  source 1..20: mol_type = other DNA
cgggtggaggcagtaggctg

SEQ ID NO: 48469 - DNA, 20 bp, synthetic construct
  misc_feature 1..20: note = chemically synthesized
  source 1..20: mol_type = other DNA
ggtggaggcagtaggctggg

SEQ ID NO: 48470 - DNA, 20 bp, synthetic construct
  misc_feature 1..20: note = chemically synthesized
  source 1..20: mol_type = other DNA
gtggaggcagtaggctgggg

SEQ ID NO: 48471 - DNA, 20 bp, synthetic construct
  misc_feature 1..20: note = chemically synthesized
  source 1..20: mol_type = other DNA
tggaggcagtaggctgggga

SEQ ID NO: 48472 - DNA, 20 bp, synthetic construct
  misc_feature 1..20: note = chemically synthesized
  source 1..20: mol_type = other DNA
ggaggcagtaggctggggag

SEQ ID NO: 48473 - DNA, 20 bp, synthetic construct
  misc_feature 1..20: note = chemically synthesized
  source 1..20: mol_type = other DNA
ggcagtaggctggggagggg

SEQ ID NO: 48474 - DNA, 20 bp, synthetic construct
  misc_feature 1..20: note = chemically synthesized
  source 1..20: mol_type = other DNA
gcagtaggctggggaggggc

SEQ ID NO: 48475 - DNA, 20 bp, synthetic construct
  misc_feature 1..20: note = chemically synthesized
  source 1..20: mol_type = other DNA
cagtaggctggggaggggcg

SEQ ID NO: 48476 - DNA, 20 bp, synthetic construct
  misc_feature 1..20: note = chemically synthesized
  source 1..20: mol_type = other DNA
gtaggctggggaggggcggg

SEQ ID NO: 48477 - DNA, 20 bp, synthetic construct
  misc_feature 1..20: note = chemically synthesized
  source 1..20: mol_type = other DNA
ctggggaggggcggggagct

SEQ ID NO: 48478 - DNA, 20 bp, synthetic construct
  misc_feature 1..20: note = chemically synthesized
  source 1..20: mol_type = other DNA
ggaggggcggggagcttgga

SEQ ID NO: 48479 - DNA, 20 bp, synthetic construct
  misc_feature 1..20: note = chemically synthesized
  source 1..20: mol_type = other DNA
gaggggcggggagcttggac

SEQ ID NO: 48480 - DNA, 20 bp, synthetic construct
  misc_feature 1..20: note = chemically synthesized
  source 1..20: mol_type = other DNA
gggcggggagcttggacagg

SEQ ID NO: 48481 - DNA, 20 bp, synthetic construct
  misc_feature 1..20: note = chemically synthesized
  source 1..20: mol_type = other DNA
ggcggggagcttggacagga

SEQ ID NO: 48482 - DNA, 20 bp, synthetic construct
  misc_feature 1..20: note = chemically synthesized
  source 1..20: mol_type = other DNA
cggggagcttggacaggaag

SEQ ID NO: 48483 - DNA, 20 bp, synthetic construct
  misc_feature 1..20: note = chemically synthesized
  source 1..20: mol_type = other DNA
aaggagccttgctcattgcc

SEQ ID NO: 48484 - DNA, 20 bp, synthetic construct
  misc_feature 1..20: note = chemically synthesized
  source 1..20: mol_type = other DNA
gagccttgctcattgcccgg

SEQ ID NO: 48485 - DNA, 20 bp, synthetic construct
  misc_feature 1..20: note = chemically synthesized
  source 1..20: mol_type = other DNA
gctcattgcccggcagacac

SEQ ID NO: 48486 - DNA, 20 bp, synthetic construct
  misc_feature 1..20: note = chemically synthesized
  source 1..20: mol_type = other DNA
ttgcccggcagacacaagac

SEQ ID NO: 48487 - DNA, 20 bp, synthetic construct
  misc_feature 1..20: note = chemically synthesized
  source 1..20: mol_type = other DNA
tgcccggcagacacaagact

SEQ ID NO: 48488 - DNA, 20 bp, synthetic construct
  misc_feature 1..20: note = chemically synthesized
  source 1..20: mol_type = other DNA
agactgggccctcataaact

SEQ ID NO: 48489 - DNA, 20 bp, synthetic construct
  misc_feature 1..20: note = chemically synthesized
  source 1..20: mol_type = other DNA
tgggccctcataaactcaga

SEQ ID NO: 48490 - DNA, 20 bp, synthetic construct
  misc_feature 1..20: note = chemically synthesized
  source 1..20: mol_type = other DNA
cctcataaactcagacagcc

SEQ ID NO: 48491 - DNA, 20 bp, synthetic construct
  misc_feature 1..20: note = chemically synthesized
  source 1..20: mol_type = other DNA
acctgttgtacctgcccttt

SEQ ID NO: 48492 - DNA, 20 bp, synthetic construct
  misc_feature 1..20: note = chemically synthesized
  source 1..20: mol_type = other DNA
gccctttcagctctgtgacc

SEQ ID NO: 48493 - DNA, 20 bp, synthetic construct
  misc_feature 1..20: note = chemically synthesized
  source 1..20: mol_type = other DNA
ccctttcagctctgtgaccc

SEQ ID NO: 48494 - DNA, 20 bp, synthetic construct
  misc_feature 1..20: note = chemically synthesized
  source 1..20: mol_type = other DNA
tcagctctgtgacccgggac

SEQ ID NO: 48495 - DNA, 20 bp, synthetic construct
  misc_feature 1..20: note = chemically synthesized
  source 1..20: mol_type = other DNA
acaagtcaccctctcccttt

SEQ ID NO: 48496 - DNA, 20 bp, synthetic construct
  misc_feature 1..20: note = chemically synthesized
  source 1..20: mol_type = other DNA
ctctccctttgagttgccgc

SEQ ID NO: 48497 - DNA, 20 bp, synthetic construct
  misc_feature 1..20: note = chemically synthesized
  source 1..20: mol_type = other DNA
ctccctttgagttgccgcaa

SEQ ID NO: 48498 - DNA, 20 bp, synthetic construct
  misc_feature 1..20: note = chemically synthesized
  source 1..20: mol_type = other DNA
tccctttgagttgccgcaag

SEQ ID NO: 48499 - DNA, 20 bp, synthetic construct
  misc_feature 1..20: note = chemically synthesized
  source 1..20: mol_type = other DNA
ttgagttgccgcaagaggta

SEQ ID NO: 48500 - DNA, 20 bp, synthetic construct
  misc_feature 1..20: note = chemically synthesized
  source 1..20: mol_type = other DNA
agaggtacagtcacactgcc

SEQ ID NO: 48501 - DNA, 20 bp, synthetic construct
  misc_feature 1..20: note = chemically synthesized
  source 1..20: mol_type = other DNA
aggtacagtcacactgccca

SEQ ID NO: 48502 - DNA, 20 bp, synthetic construct
  misc_feature 1..20: note = chemically synthesized
  source 1..20: mol_type = other DNA
ggtacagtcacactgcccag

SEQ ID NO: 48503 - DNA, 20 bp, synthetic construct
  misc_feature 1..20: note = chemically synthesized
  source 1..20: mol_type = other DNA
cacactgcccagaggattac

SEQ ID NO: 48504 - DNA, 20 bp, synthetic construct
  misc_feature 1..20: note = chemically synthesized
  source 1..20: mol_type = other DNA
cagaggattactagaaatga

SEQ ID NO: 48505 - DNA, 20 bp, synthetic construct
  misc_feature 1..20: note = chemically synthesized
  source 1..20: mol_type = other DNA
agaggattactagaaatgac

SEQ ID NO: 48506 - DNA, 20 bp, synthetic construct
  misc_feature 1..20: note = chemically synthesized
  source 1..20: mol_type = other DNA
aatgacaggcctcgccctcc

SEQ ID NO: 48507 - DNA, 20 bp, synthetic construct
  misc_feature 1..20: note = chemically synthesized
  source 1..20: mol_type = other DNA
caggcctcgccctcctggca

SEQ ID NO: 48508 - DNA, 20 bp, synthetic construct
  misc_feature 1..20: note = chemically synthesized
  source 1..20: mol_type = other DNA
tcgccctcctggcacagacc

SEQ ID NO: 48509 - DNA, 20 bp, synthetic construct
  misc_feature 1..20: note = chemically synthesized
  source 1..20: mol_type = other DNA
acagacctggcaccaataac

SEQ ID NO: 48510 - DNA, 20 bp, synthetic construct
  misc_feature 1..20: note = chemically synthesized
  source 1..20: mol_type = other DNA
gacctggcaccaataactgg

SEQ ID NO: 48511 - DNA, 20 bp, synthetic construct
  misc_feature 1..20: note = chemically synthesized
  source 1..20: mol_type = other DNA
acctggcaccaataactggc

SEQ ID NO: 48512 - DNA, 20 bp, synthetic construct
  misc_feature 1..20: note = chemically synthesized
  source 1..20: mol_type = other DNA
accaataactggcaggtttc

SEQ ID NO: 48513 - DNA, 20 bp, synthetic construct
  misc_feature 1..20: note = chemically synthesized
  source 1..20: mol_type = other DNA
ccaataactggcaggtttct

SEQ ID NO: 48514 - DNA, 20 bp, synthetic construct
  misc_feature 1..20: note = chemically synthesized
  source 1..20: mol_type = other DNA
caataactggcaggtttctg

SEQ ID NO: 48515 - DNA, 20 bp, synthetic construct
  misc_feature 1..20: note = chemically synthesized
  source 1..20: mol_type = other DNA
aactggcaggtttctggggc

SEQ ID NO: 48516 - DNA, 20 bp, synthetic construct
  misc_feature 1..20: note = chemically synthesized
  source 1..20: mol_type = other DNA
caggtttctggggccagctg

SEQ ID NO: 48517 - DNA, 20 bp, synthetic construct
  misc_feature 1..20: note = chemically synthesized
  source 1..20: mol_type = other DNA
ggtttctggggccagctgca

SEQ ID NO: 48518 - DNA, 20 bp, synthetic construct
  misc_feature 1..20: note = chemically synthesized
  source 1..20: mol_type = other DNA
gtttctggggccagctgcag

SEQ ID NO: 48519 - DNA, 20 bp, synthetic construct
  misc_feature 1..20: note = chemically synthesized
  source 1..20: mol_type = other DNA
tttctggggccagctgcaga

SEQ ID NO: 48520 - DNA, 20 bp, synthetic construct
  misc_feature 1..20: note = chemically synthesized
  source 1..20: mol_type = other DNA
ctggggccagctgcagaggg

SEQ ID NO: 48521 - DNA, 20 bp, synthetic construct
  misc_feature 1..20: note = chemically synthesized
  source 1..20: mol_type = other DNA
ggggccagctgcagagggaa

SEQ ID NO: 48522 - DNA, 20 bp, synthetic construct
  misc_feature 1..20: note = chemically synthesized
  source 1..20: mol_type = other DNA
gggccagctgcagagggaag

SEQ ID NO: 48523 - DNA, 20 bp, synthetic construct
  misc_feature 1..20: note = chemically synthesized
  source 1..20: mol_type = other DNA
gctgcagagggaagaggact

SEQ ID NO: 48524 - DNA, 20 bp, synthetic construct
  misc_feature 1..20: note = chemically synthesized
  source 1..20: mol_type = other DNA
tgagccacctatgaaatgcc

SEQ ID NO: 48525 - DNA, 20 bp, synthetic construct
  misc_feature 1..20: note = chemically synthesized
  source 1..20: mol_type = other DNA
gccacctatgaaatgcccag

SEQ ID NO: 48526 - DNA, 20 bp, synthetic construct
  misc_feature 1..20: note = chemically synthesized
  source 1..20: mol_type = other DNA
ccacctatgaaatgcccagt

SEQ ID NO: 48527 - DNA, 20 bp, synthetic construct
  misc_feature 1..20: note = chemically synthesized
  source 1..20: mol_type = other DNA
cctatgaaatgcccagtggg

SEQ ID NO: 48528 - DNA, 20 bp, synthetic construct
  misc_feature 1..20: note = chemically synthesized
  source 1..20: mol_type = other DNA
atgcccagtgggcagcccca

SEQ ID NO: 48529 - DNA, 20 bp, synthetic construct
  misc_feature 1..20: note = chemically synthesized
  source 1..20: mol_type = other DNA
ccagtgggcagccccacagt

SEQ ID NO: 48530 - DNA, 20 bp, synthetic construct
  misc_feature 1..20: note = chemically synthesized
  source 1..20: mol_type = other DNA
cagtgggcagccccacagtt

SEQ ID NO: 48531 - DNA, 20 bp, synthetic construct
  misc_feature 1..20: note = chemically synthesized
  source 1..20: mol_type = other DNA
tgggcagccccacagttggg

SEQ ID NO: 48532 - DNA, 20 bp, synthetic construct
  misc_feature 1..20: note = chemically synthesized
  source 1..20: mol_type = other DNA
gggcagccccacagttgggc

SEQ ID NO: 48533 - DNA, 20 bp, synthetic construct
  misc_feature 1..20: note = chemically synthesized
  source 1..20: mol_type = other DNA
ttgggcaggtctgtgtgcac

SEQ ID NO: 48534 - DNA, 20 bp, synthetic construct
  misc_feature 1..20: note = chemically synthesized
  source 1..20: mol_type = other DNA
tgggcaggtctgtgtgcact

SEQ ID NO: 48535 - DNA, 20 bp, synthetic construct
  misc_feature 1..20: note = chemically synthesized
  source 1..20: mol_type = other DNA
gggcaggtctgtgtgcactg

SEQ ID NO: 48536 - DNA, 20 bp, synthetic construct
  misc_feature 1..20: note = chemically synthesized
  source 1..20: mol_type = other DNA
gcaggtctgtgtgcactggg

SEQ ID NO: 48537 - DNA, 20 bp, synthetic construct
  misc_feature 1..20: note = chemically synthesized
  source 1..20: mol_type = other DNA
caggtctgtgtgcactgggg

SEQ ID NO: 48538 - DNA, 20 bp, synthetic construct
  misc_feature 1..20: note = chemically synthesized
  source 1..20: mol_type = other DNA
cactggggaggtgtgtgtca

SEQ ID NO: 48539 - DNA, 20 bp, synthetic construct
  misc_feature 1..20: note = chemically synthesized
  source 1..20: mol_type = other DNA
actggggaggtgtgtgtcat

SEQ ID NO: 48540 - DNA, 20 bp, synthetic construct
  misc_feature 1..20: note = chemically synthesized
  source 1..20: mol_type = other DNA
gaggtgtgtgtcataggacc

SEQ ID NO: 48541 - DNA, 20 bp, synthetic construct
  misc_feature 1..20: note = chemically synthesized
  source 1..20: mol_type = other DNA
tcctatgacacacacctccc

SEQ ID NO: 48542 - DNA, 20 bp, synthetic construct
  misc_feature 1..20: note = chemically synthesized
  source 1..20: mol_type = other DNA
acacacctccccagtgcaca

SEQ ID NO: 48543 - DNA, 20 bp, synthetic construct
  misc_feature 1..20: note = chemically synthesized
  source 1..20: mol_type = other DNA
cacacagacctgcccaactg

SEQ ID NO: 48544 - DNA, 20 bp, synthetic construct
  misc_feature 1..20: note = chemically synthesized
  source 1..20: mol_type = other DNA
acacagacctgcccaactgt

SEQ ID NO: 48545 - DNA, 20 bp, synthetic construct
  misc_feature 1..20: note = chemically synthesized
  source 1..20: mol_type = other DNA
cacagacctgcccaactgtg

SEQ ID NO: 48546 - DNA, 20 bp, synthetic construct
  misc_feature 1..20: note = chemically synthesized
  source 1..20: mol_type = other DNA
ccaactgtggggctgcccac

SEQ ID NO: 48547 - DNA, 20 bp, synthetic construct
  misc_feature 1..20: note = chemically synthesized
  source 1..20: mol_type = other DNA
caactgtggggctgcccact

SEQ ID NO: 48548 - DNA, 20 bp, synthetic construct
  misc_feature 1..20: note = chemically synthesized
  source 1..20: mol_type = other DNA
gctgcccactgggcatttca

SEQ ID NO: 48549 - DNA, 20 bp, synthetic construct
  misc_feature 1..20: note = chemically synthesized
  source 1..20: mol_type = other DNA
ctgcccactgggcatttcat

SEQ ID NO: 48550 - DNA, 20 bp, synthetic construct
  misc_feature 1..20: note = chemically synthesized
  source 1..20: mol_type = other DNA
cccactgggcatttcatagg

SEQ ID NO: 48551 - DNA, 20 bp, synthetic construct
  misc_feature 1..20: note = chemically synthesized
  source 1..20: mol_type = other DNA
tgggcatttcataggtggct

SEQ ID NO: 48552 - DNA, 20 bp, synthetic construct
  misc_feature 1..20: note = chemically synthesized
  source 1..20: mol_type = other DNA
gctcagtcctcttccctctg

SEQ ID NO: 48553 - DNA, 20 bp, synthetic construct
  misc_feature 1..20: note = chemically synthesized
  source 1..20: mol_type = other DNA
agtcctcttccctctgcagc

SEQ ID NO: 48554 - DNA, 20 bp, synthetic construct
  misc_feature 1..20: note = chemically synthesized
  source 1..20: mol_type = other DNA
cttccctctgcagctggccc

SEQ ID NO: 48555 - DNA, 20 bp, synthetic construct
  misc_feature 1..20: note = chemically synthesized
  source 1..20: mol_type = other DNA
agctggccccagaaacctgc

SEQ ID NO: 48556 - DNA, 20 bp, synthetic construct
  misc_feature 1..20: note = chemically synthesized
  source 1..20: mol_type = other DNA
cccagaaacctgccagttat

SEQ ID NO: 48557 - DNA, 20 bp, synthetic construct
  misc_feature 1..20: note = chemically synthesized
  source 1..20: mol_type = other DNA
aacctgccagttattggtgc

SEQ ID NO: 48558 - DNA, 20 bp, synthetic construct
  misc_feature 1..20: note = chemically synthesized
  source 1..20: mol_type = other DNA
acctgccagttattggtgcc

SEQ ID NO: 48559 - DNA, 20 bp, synthetic construct
  misc_feature 1..20: note = chemically synthesized
  source 1..20: mol_type = other DNA
tattggtgccaggtctgtgc

SEQ ID NO: 48560 - DNA, 20 bp, synthetic construct
  misc_feature 1..20: note = chemically synthesized
  source 1..20: mol_type = other DNA
attggtgccaggtctgtgcc

SEQ ID NO: 48561 - DNA, 20 bp, synthetic construct
  misc_feature 1..20: note = chemically synthesized
  source 1..20: mol_type = other DNA
tggtgccaggtctgtgccag

SEQ ID NO: 48562 - DNA, 20 bp, synthetic construct
  misc_feature 1..20: note = chemically synthesized
  source 1..20: mol_type = other DNA
ggtgccaggtctgtgccagg

SEQ ID NO: 48563 - DNA, 20 bp, synthetic construct
  misc_feature 1..20: note = chemically synthesized
  source 1..20: mol_type = other DNA
gtgccaggtctgtgccagga

SEQ ID NO: 48564 - DNA, 20 bp, synthetic construct
  misc_feature 1..20: note = chemically synthesized
  source 1..20: mol_type = other DNA
caggtctgtgccaggagggc

SEQ ID NO: 48565 - DNA, 20 bp, synthetic construct
  misc_feature 1..20: note = chemically synthesized
  source 1..20: mol_type = other DNA
aggtctgtgccaggagggcg

SEQ ID NO: 48566 - DNA, 20 bp, synthetic construct
  misc_feature 1..20: note = chemically synthesized
  source 1..20: mol_type = other DNA
agggcgaggcctgtcatttc

SEQ ID NO: 48567 - DNA, 20 bp, synthetic construct
  misc_feature 1..20: note = chemically synthesized
  source 1..20: mol_type = other DNA
tgtcatttctagtaatcctc

SEQ ID NO: 48568 - DNA, 20 bp, synthetic construct
  misc_feature 1..20: note = chemically synthesized
  source 1..20: mol_type = other DNA
gtcatttctagtaatcctct

SEQ ID NO: 48569 - DNA, 20 bp, synthetic construct
  misc_feature 1..20: note = chemically synthesized
  source 1..20: mol_type = other DNA
atttctagtaatcctctggg

SEQ ID NO: 48570 - DNA, 20 bp, synthetic construct
  misc_feature 1..20: note = chemically synthesized
  source 1..20: mol_type = other DNA
cagtgtgactgtacctcttg

SEQ ID NO: 48571 - DNA, 20 bp, synthetic construct
  misc_feature 1..20: note = chemically synthesized
  source 1..20: mol_type = other DNA
gtacctcttgcggcaactca

SEQ ID NO: 48572 - DNA, 20 bp, synthetic construct
  misc_feature 1..20: note = chemically synthesized
  source 1..20: mol_type = other DNA
tacctcttgcggcaactcaa

SEQ ID NO: 48573 - DNA, 20 bp, synthetic construct
  misc_feature 1..20: note = chemically synthesized
  source 1..20: mol_type = other DNA
acctcttgcggcaactcaaa

SEQ ID NO: 48574 - DNA, 20 bp, synthetic construct
  misc_feature 1..20: note = chemically synthesized
  source 1..20: mol_type = other DNA
ctcttgcggcaactcaaagg

SEQ ID NO: 48575 - DNA, 20 bp, synthetic construct
  misc_feature 1..20: note = chemically synthesized
  source 1..20: mol_type = other DNA
cttgcggcaactcaaaggga

SEQ ID NO: 48576 - DNA, 20 bp, synthetic construct
  misc_feature 1..20: note = chemically synthesized
  source 1..20: mol_type = other DNA
ttgcggcaactcaaagggag

SEQ ID NO: 48577 - DNA, 20 bp, synthetic construct
  misc_feature 1..20: note = chemically synthesized
  source 1..20: mol_type = other DNA
tgcggcaactcaaagggaga

SEQ ID NO: 48578 - DNA, 20 bp, synthetic construct
  misc_feature 1..20: note = chemically synthesized
  source 1..20: mol_type = other DNA
agggagagggtgacttgtcc

SEQ ID NO: 48579 - DNA, 20 bp, synthetic construct
  misc_feature 1..20: note = chemically synthesized
  source 1..20: mol_type = other DNA
gggagagggtgacttgtccc

SEQ ID NO: 48580 - DNA, 20 bp, synthetic construct
  misc_feature 1..20: note = chemically synthesized
  source 1..20: mol_type = other DNA
gggtgacttgtcccgggtca

SEQ ID NO: 48581 - DNA, 20 bp, synthetic construct
  misc_feature 1..20: note = chemically synthesized
  source 1..20: mol_type = other DNA
gtgacttgtcccgggtcaca

SEQ ID NO: 48582 - DNA, 20 bp, synthetic construct
  misc_feature 1..20: note = chemically synthesized
  source 1..20: mol_type = other DNA
gtcccgggtcacagagctga

SEQ ID NO: 48583 - DNA, 20 bp, synthetic construct
  misc_feature 1..20: note = chemically synthesized
  source 1..20: mol_type = other DNA
tcccgggtcacagagctgaa

SEQ ID NO: 48584 - DNA, 20 bp, synthetic construct
  misc_feature 1..20: note = chemically synthesized
  source 1..20: mol_type = other DNA
cccgggtcacagagctgaaa

SEQ ID NO: 48585 - DNA, 20 bp, synthetic construct
  misc_feature 1..20: note = chemically synthesized
  source 1..20: mol_type = other DNA
gggtcacagagctgaaaggg

SEQ ID NO: 48586 - DNA, 20 bp, synthetic construct
  misc_feature 1..20: note = chemically synthesized
  source 1..20: mol_type = other DNA
ggtcacagagctgaaagggc

SEQ ID NO: 48587 - DNA, 20 bp, synthetic construct
  misc_feature 1..20: note = chemically synthesized
  source 1..20: mol_type = other DNA
agctgaaagggcaggtacaa

SEQ ID NO: 48588 - DNA, 20 bp, synthetic construct
  misc_feature 1..20: note = chemically synthesized
  source 1..20: mol_type = other DNA
gctgaaagggcaggtacaac

SEQ ID NO: 48589 - DNA, 20 bp, synthetic construct
  misc_feature 1..20: note = chemically synthesized
  source 1..20: mol_type = other DNA
aggtacaacaggtgacatgc

SEQ ID NO: 48590 - DNA, 20 bp, synthetic construct
  misc_feature 1..20: note = chemically synthesized
  source 1..20: mol_type = other DNA
ggtacaacaggtgacatgcc

SEQ ID NO: 48591 - DNA, 20 bp, synthetic construct
  misc_feature 1..20: note = chemically synthesized
  source 1..20: mol_type = other DNA
ggtgacatgccgggctgtct

SEQ ID NO: 48592 - DNA, 20 bp, synthetic construct
  misc_feature 1..20: note = chemically synthesized
  source 1..20: mol_type = other DNA
gccgggctgtctgagtttat

SEQ ID NO: 48593 - DNA, 20 bp, synthetic construct
  misc_feature 1..20: note = chemically synthesized
  source 1..20: mol_type = other DNA
ccgggctgtctgagtttatg

SEQ ID NO: 48594 - DNA, 20 bp, synthetic construct
  misc_feature 1..20: note = chemically synthesized
  source 1..20: mol_type = other DNA
cgggctgtctgagtttatga

SEQ ID NO: 48595 - DNA, 20 bp, synthetic construct
  misc_feature 1..20: note = chemically synthesized
  source 1..20: mol_type = other DNA
tgtctgagtttatgagggcc

SEQ ID NO: 48596 - DNA, 20 bp, synthetic construct
  misc_feature 1..20: note = chemically synthesized
  source 1..20: mol_type = other DNA
gggcccagtcttgtgtctgc

SEQ ID NO: 48597 - DNA, 20 bp, synthetic construct
  misc_feature 1..20: note = chemically synthesized
  source 1..20: mol_type = other DNA
ggcccagtcttgtgtctgcc

SEQ ID NO: 48598 - DNA, 20 bp, synthetic construct
  misc_feature 1..20: note = chemically synthesized
  source 1..20: mol_type = other DNA
tcttgtgtctgccgggcaat

SEQ ID NO: 48599 - DNA, 20 bp, synthetic construct
  misc_feature 1..20: note = chemically synthesized
  source 1..20: mol_type = other DNA
gtgtctgccgggcaatgagc

SEQ ID NO: 48600 - DNA, 20 bp, synthetic construct
  misc_feature 1..20: note = chemically synthesized
  source 1..20: mol_type = other DNA
tgtctgccgggcaatgagca

SEQ ID NO: 48601 - DNA, 20 bp, synthetic construct
  misc_feature 1..20: note = chemically synthesized
  source 1..20: mol_type = other DNA
agcaaggctccttcctgtcc

SEQ ID NO: 48602 - DNA, 20 bp, synthetic construct
  misc_feature 1..20: note = chemically synthesized
  source 1..20: mol_type = other DNA
ccaagctccccgcccctccc

SEQ ID NO: 48603 - DNA, 20 bp, synthetic construct
  misc_feature 1..20: note = chemically synthesized
  source 1..20: mol_type = other DNA
cagcctactgcctccacccg

SEQ ID NO: 48604 - DNA, 20 bp, synthetic construct
  misc_feature 1..20: note = chemically synthesized
  source 1..20: mol_type = other DNA
tccacccgaagtctacttcc

SEQ ID NO: 48605 - DNA, 20 bp, synthetic construct
  misc_feature 1..20: note = chemically synthesized
  source 1..20: mol_type = other DNA
ccacccgaagtctacttcct

SEQ ID NO: 48606 - DNA, 20 bp, synthetic construct
  misc_feature 1..20: note = chemically synthesized
  source 1..20: mol_type = other DNA
cccgaagtctacttcctggg

SEQ ID NO: 48607 - DNA, 20 bp, synthetic construct
  misc_feature 1..20: note = chemically synthesized
  source 1..20: mol_type = other DNA
ccgaagtctacttcctgggt

SEQ ID NO: 48608 - DNA, 20 bp, synthetic construct
  misc_feature 1..20: note = chemically synthesized
  source 1..20: mol_type = other DNA
aagtctacttcctgggtggg

SEQ ID NO: 48609 - DNA, 20 bp, synthetic construct
  misc_feature 1..20: note = chemically synthesized
  source 1..20: mol_type = other DNA
agtctacttcctgggtgggc

SEQ ID NO: 48610 - DNA, 20 bp, synthetic construct
  misc_feature 1..20: note = chemically synthesized
  source 1..20: mol_type = other DNA
cttcctgggtgggcaggaac

SEQ ID NO: 48611 - DNA, 20 bp, synthetic construct
  misc_feature 1..20: note = chemically synthesized
  source 1..20: mol_type = other DNA
ttcctgggtgggcaggaact

SEQ ID NO: 48612 - DNA, 20 bp, synthetic construct
  misc_feature 1..20: note = chemically synthesized
  source 1..20: mol_type = other DNA
caggaactgggcactgtgcc

SEQ ID NO: 48613 - DNA, 20 bp, synthetic construct
  misc_feature 1..20: note = chemically synthesized
  source 1..20: mol_type = other DNA
aggaactgggcactgtgccc

SEQ ID NO: 48614 - DNA, 20 bp, synthetic construct
  misc_feature 1..20: note = chemically synthesized
  source 1..20: mol_type = other DNA
ggaactgggcactgtgccca

SEQ ID NO: 48615 - DNA, 20 bp, synthetic construct
  misc_feature 1..20: note = chemically synthesized
  source 1..20: mol_type = other DNA
gggcatgcactgcctccacg

SEQ ID NO: 48616 - DNA, 20 bp, synthetic construct
  misc_feature 1..20: note = chemically synthesized
  source 1..20: mol_type = other DNA
tgcctccacgcagcaaccct

SEQ ID NO: 48617 - DNA, 20 bp, synthetic construct
  misc_feature 1..20: note = chemically synthesized
  source 1..20: mol_type = other DNA
cctccacgcagcaaccctca

SEQ ID NO: 48618 - DNA, 20 bp, synthetic construct
  misc_feature 1..20: note = chemically synthesized
  source 1..20: mol_type = other DNA
gcagcaaccctcagagtcct

SEQ ID NO: 48619 - DNA, 20 bp, synthetic construct
  misc_feature 1..20: note = chemically synthesized
  source 1..20: mol_type = other DNA
tcagagtcctgagctgaacc

SEQ ID NO: 48620 - DNA, 20 bp, synthetic construct
  misc_feature 1..20: note = chemically synthesized
  source 1..20: mol_type = other DNA
gagtcctgagctgaaccaag

SEQ ID NO: 48621 - DNA, 20 bp, synthetic construct
  misc_feature 1..20: note = chemically synthesized
  source 1..20: mol_type = other DNA
agtcctgagctgaaccaaga

SEQ ID NO: 48622 - DNA, 20 bp, synthetic construct
  misc_feature 1..20: note = chemically synthesized
  source 1..20: mol_type = other DNA
tcctgagctgaaccaagaag

SEQ ID NO: 48623 - DNA, 20 bp, synthetic construct
  misc_feature 1..20: note = chemically synthesized
  source 1..20: mol_type = other DNA
cctgagctgaaccaagaagg

SEQ ID NO: 48624 - DNA, 20 bp, synthetic construct
  misc_feature 1..20: note = chemically synthesized
  source 1..20: mol_type = other DNA
tgagctgaaccaagaaggag

SEQ ID NO: 48625 - DNA, 20 bp, synthetic construct
  misc_feature 1..20: note = chemically synthesized
  source 1..20: mol_type = other DNA
gagctgaaccaagaaggagg

SEQ ID NO: 48626 - DNA, 20 bp, synthetic construct
  misc_feature 1..20: note = chemically synthesized
  source 1..20: mol_type = other DNA
agctgaaccaagaaggagga

SEQ ID NO: 48627 - DNA, 20 bp, synthetic construct
  misc_feature 1..20: note = chemically synthesized
  source 1..20: mol_type = other DNA
gctgaaccaagaaggaggag

SEQ ID NO: 48628 - DNA, 20 bp, synthetic construct
  misc_feature 1..20: note = chemically synthesized
  source 1..20: mol_type = other DNA
ctgaaccaagaaggaggagg

SEQ ID NO: 48629 - DNA, 20 bp, synthetic construct
  misc_feature 1..20: note = chemically synthesized
  source 1..20: mol_type = other DNA
accaagaaggaggagggggt

SEQ ID NO: 48630 - DNA, 20 bp, synthetic construct
  misc_feature 1..20: note = chemically synthesized
  source 1..20: mol_type = other DNA
ccaagaaggaggagggggtc

SEQ ID NO: 48631 - DNA, 20 bp, synthetic construct
  misc_feature 1..20: note = chemically synthesized
  source 1..20: mol_type = other DNA
gaggagggggtcgggcctcc

SEQ ID NO: 48632 - DNA, 20 bp, synthetic construct
  misc_feature 1..20: note = chemically synthesized
  source 1..20: mol_type = other DNA
aggagggggtcgggcctccg

SEQ ID NO: 48633 - DNA, 20 bp, synthetic construct
  misc_feature 1..20: note = chemically synthesized
  source 1..20: mol_type = other DNA
agggggtcgggcctccgagg

SEQ ID NO: 48634 - DNA, 20 bp, synthetic construct
  misc_feature 1..20: note = chemically synthesized
  source 1..20: mol_type = other DNA
gggggtcgggcctccgagga

SEQ ID NO: 48635 - DNA, 20 bp, synthetic construct
  misc_feature 1..20: note = chemically synthesized
  source 1..20: mol_type = other DNA
tcgggcctccgaggaaggcc

SEQ ID NO: 48636 - DNA, 20 bp, synthetic construct
  misc_feature 1..20: note = chemically synthesized
  source 1..20: mol_type = other DNA
ggcctagccgctgctgctgc

SEQ ID NO: 48637 - DNA, 20 bp, synthetic construct
  misc_feature 1..20: note = chemically synthesized
  source 1..20: mol_type = other DNA
gcctagccgctgctgctgcc

SEQ ID NO: 48638 - DNA, 20 bp, synthetic construct
  misc_feature 1..20: note = chemically synthesized
  source 1..20: mol_type = other DNA
gctgctgctgccaggaattc

SEQ ID NO: 48639 - DNA, 20 bp, synthetic construct
  misc_feature 1..20: note = chemically synthesized
  source 1..20: mol_type = other DNA
ctgctgctgccaggaattcc

SEQ ID NO: 48640 - DNA, 20 bp, synthetic construct
  misc_feature 1..20: note = chemically synthesized
  source 1..20: mol_type = other DNA
tgctgccaggaattccaggt

SEQ ID NO: 48641 - DNA, 20 bp, synthetic construct
  misc_feature 1..20: note = chemically synthesized
  source 1..20: mol_type = other DNA
ctgccaggaattccaggttg

SEQ ID NO: 48642 - DNA, 20 bp, synthetic construct
  misc_feature 1..20: note = chemically synthesized
  source 1..20: mol_type = other DNA
tgccaggaattccaggttgg

SEQ ID NO: 48643 - DNA, 20 bp, synthetic construct
  misc_feature 1..20: note = chemically synthesized
  source 1..20: mol_type = other DNA
gccaggaattccaggttgga

SEQ ID NO: 48644 - DNA, 20 bp, synthetic construct
  misc_feature 1..20: note = chemically synthesized
  source 1..20: mol_type = other DNA
ccaggaattccaggttggag

SEQ ID NO: 48645 - DNA, 20 bp, synthetic construct
  misc_feature 1..20: note = chemically synthesized
  source 1..20: mol_type = other DNA
ggaattccaggttggagggg

SEQ ID NO: 48646 - DNA, 20 bp, synthetic construct
  misc_feature 1..20: note = chemically synthesized
  source 1..20: mol_type = other DNA
gaggggcggcaacctcctgc

SEQ ID NO: 48647 - DNA, 20 bp, synthetic construct
  misc_feature 1..20: note = chemically synthesized
  source 1..20: mol_type = other DNA
ggcaacctcctgccagcctt

SEQ ID NO: 48648 - DNA, 20 bp, synthetic construct
  misc_feature 1..20: note = chemically synthesized
  source 1..20: mol_type = other DNA
gcaacctcctgccagccttc

SEQ ID NO: 48649 - DNA, 20 bp, synthetic construct
  misc_feature 1..20: note = chemically synthesized
  source 1..20: mol_type = other DNA
ggccactctcctgtgcctgc

SEQ ID NO: 48650 - DNA, 20 bp, synthetic construct
  misc_feature 1..20: note = chemically synthesized
  source 1..20: mol_type = other DNA
cactctcctgtgcctgccag

SEQ ID NO: 48651 - DNA, 20 bp, synthetic construct
  misc_feature 1..20: note = chemically synthesized
  source 1..20: mol_type = other DNA
ctctcctgtgcctgccagaa

SEQ ID NO: 48652 - DNA, 20 bp, synthetic construct
  misc_feature 1..20: note = chemically synthesized
  source 1..20: mol_type = other DNA
cctgtgcctgccagaagaga

SEQ ID NO: 48653 - DNA, 20 bp, synthetic construct
  misc_feature 1..20: note = chemically synthesized
  source 1..20: mol_type = other DNA
tgtgcctgccagaagagaca

SEQ ID NO: 48654 - DNA, 20 bp, synthetic construct
  misc_feature 1..20: note = chemically synthesized
  source 1..20: mol_type = other DNA
tgccagaagagacagagctt

SEQ ID NO: 48655 - DNA, 20 bp, synthetic construct
  misc_feature 1..20: note = chemically synthesized
  source 1..20: mol_type = other DNA
gccagaagagacagagcttg

SEQ ID NO: 48656 - DNA, 20 bp, synthetic construct
  misc_feature 1..20: note = chemically synthesized
  source 1..20: mol_type = other DNA
cagaagagacagagcttgag

SEQ ID NO: 48657 - DNA, 20 bp, synthetic construct
  misc_feature 1..20: note = chemically synthesized
  source 1..20: mol_type = other DNA
gaagagacagagcttgagga

SEQ ID NO: 48658 - DNA, 20 bp, synthetic construct
  misc_feature 1..20: note = chemically synthesized
  source 1..20: mol_type = other DNA
acagagcttgaggagagctt

SEQ ID NO: 48659 - DNA, 20 bp, synthetic construct
  misc_feature 1..20: note = chemically synthesized
  source 1..20: mol_type = other DNA
cagagcttgaggagagcttg

SEQ ID NO: 48660 - DNA, 20 bp, synthetic construct
  misc_feature 1..20: note = chemically synthesized
  source 1..20: mol_type = other DNA
gagcttgaggagagcttgag

SEQ ID NO: 48661 - DNA, 20 bp, synthetic construct
  misc_feature 1..20: note = chemically synthesized
  source 1..20: mol_type = other DNA
gcttgaggagagcttgagga

SEQ ID NO: 48662 - DNA, 20 bp, synthetic construct
  misc_feature 1..20: note = chemically synthesized
  source 1..20: mol_type = other DNA
tgaggagagcttgaggagag

SEQ ID NO: 48663 - DNA, 20 bp, synthetic construct
  misc_feature 1..20: note = chemically synthesized
  source 1..20: mol_type = other DNA
gaggagagcttgaggagagc

SEQ ID NO: 48664 - DNA, 20 bp, synthetic construct
  misc_feature 1..20: note = chemically synthesized
  source 1..20: mol_type = other DNA
agagcttgaggagagcagga

SEQ ID NO: 48665 - DNA, 20 bp, synthetic construct
  misc_feature 1..20: note = chemically synthesized
  source 1..20: mol_type = other DNA
gagcttgaggagagcaggaa

SEQ ID NO: 48666 - DNA, 20 bp, synthetic construct
  misc_feature 1..20: note = chemically synthesized
  source 1..20: mol_type = other DNA
cttgaggagagcaggaaagg

SEQ ID NO: 48667 - DNA, 20 bp, synthetic construct
  misc_feature 1..20: note = chemically synthesized
  source 1..20: mol_type = other DNA
ttgaggagagcaggaaaggt

SEQ ID NO: 48668 - DNA, 20 bp, synthetic construct
  misc_feature 1..20: note = chemically synthesized
  source 1..20: mol_type = other DNA
cattgctgctgctgctcact

SEQ ID NO: 48669 - DNA, 20 bp, synthetic construct
  misc_feature 1..20: note = chemically synthesized
  source 1..20: mol_type = other DNA
ctgctgctcactcagttcca

SEQ ID NO: 48670 - DNA, 20 bp, synthetic construct
  misc_feature 1..20: note = chemically synthesized
  source 1..20: mol_type = other DNA
tgctgctcactcagttccac

SEQ ID NO: 48671 - DNA, 20 bp, synthetic construct
  misc_feature 1..20: note = chemically synthesized
  source 1..20: mol_type = other DNA
tgctcactcagttccacagg

SEQ ID NO: 48672 - DNA, 20 bp, synthetic construct
  misc_feature 1..20: note = chemically synthesized
  source 1..20: mol_type = other DNA
gctcactcagttccacaggt

SEQ ID NO: 48673 - DNA, 20 bp, synthetic construct
  misc_feature 1..20: note = chemically synthesized
  source 1..20: mol_type = other DNA
tcactcagttccacaggtgg

SEQ ID NO: 48674 - DNA, 20 bp, synthetic construct
  misc_feature 1..20: note = chemically synthesized
  source 1..20: mol_type = other DNA
cactcagttccacaggtggg

SEQ ID NO: 48675 - DNA, 20 bp, synthetic construct
  misc_feature 1..20: note = chemically synthesized
  source 1..20: mol_type = other DNA
actcagttccacaggtggga

SEQ ID NO: 48676 - DNA, 20 bp, synthetic construct
  misc_feature 1..20: note = chemically synthesized
  source 1..20: mol_type = other DNA
agttccacaggtgggaggga

SEQ ID NO: 48677 - DNA, 20 bp, synthetic construct
  misc_feature 1..20: note = chemically synthesized
  source 1..20: mol_type = other DNA
tccacaggtgggagggacag

SEQ ID NO: 48678 - DNA, 20 bp, synthetic construct
  misc_feature 1..20: note = chemically synthesized
  source 1..20: mol_type = other DNA
ccacaggtgggagggacagc

SEQ ID NO: 48679 - DNA, 20 bp, synthetic construct
  misc_feature 1..20: note = chemically synthesized
  source 1..20: mol_type = other DNA
cacaggtgggagggacagca

SEQ ID NO: 48680 - DNA, 20 bp, synthetic construct
  misc_feature 1..20: note = chemically synthesized
  source 1..20: mol_type = other DNA
gtgggagggacagcagggct

SEQ ID NO: 48681 - DNA, 20 bp, synthetic construct
  misc_feature 1..20: note = chemically synthesized
  source 1..20: mol_type = other DNA
gggagggacagcagggctta

SEQ ID NO: 48682 - DNA, 20 bp, synthetic construct
  misc_feature 1..20: note = chemically synthesized
  source 1..20: mol_type = other DNA
agggacagcagggcttagag

SEQ ID NO: 48683 - DNA, 20 bp, synthetic construct
  misc_feature 1..20: note = chemically synthesized
  source 1..20: mol_type = other DNA
gggacagcagggcttagagt

SEQ ID NO: 48684 - DNA, 20 bp, synthetic construct
  misc_feature 1..20: note = chemically synthesized
  source 1..20: mol_type = other DNA
ggacagcagggcttagagtg

SEQ ID NO: 48685 - DNA, 20 bp, synthetic construct
  misc_feature 1..20: note = chemically synthesized
  source 1..20: mol_type = other DNA
gacagcagggcttagagtgg

SEQ ID NO: 48686 - DNA, 20 bp, synthetic construct
  misc_feature 1..20: note = chemically synthesized
  source 1..20: mol_type = other DNA
ttagagtgggggtcattgtg

SEQ ID NO: 48687 - DNA, 20 bp, synthetic construct
  misc_feature 1..20: note = chemically synthesized
  source 1..20: mol_type = other DNA
agtgggggtcattgtgcaga

SEQ ID NO: 48688 - DNA, 20 bp, synthetic construct
  misc_feature 1..20: note = chemically synthesized
  source 1..20: mol_type = other DNA
gtgggggtcattgtgcagat

SEQ ID NO: 48689 - DNA, 20 bp, synthetic construct
  misc_feature 1..20: note = chemically synthesized
  source 1..20: mol_type = other DNA
attgtgcagatgggaaaaca

SEQ ID NO: 48690 - DNA, 20 bp, synthetic construct
  misc_feature 1..20: note = chemically synthesized
  source 1..20: mol_type = other DNA
ttgtgcagatgggaaaacaa

SEQ ID NO: 48691 - DNA, 20 bp, synthetic construct
  misc_feature 1..20: note = chemically synthesized
  source 1..20: mol_type = other DNA
cagatgggaaaacaaaggcc

SEQ ID NO: 48692 - DNA, 20 bp, synthetic construct
  misc_feature 1..20: note = chemically synthesized
  source 1..20: mol_type = other DNA
gatgggaaaacaaaggccca

SEQ ID NO: 48693 - DNA, 20 bp, synthetic construct
  misc_feature 1..20: note = chemically synthesized
  source 1..20: mol_type = other DNA
tgggaaaacaaaggcccaga

SEQ ID NO: 48694 - DNA, 20 bp, synthetic construct
  misc_feature 1..20: note = chemically synthesized
  source 1..20: mol_type = other DNA
gggaaaacaaaggcccagag

SEQ ID NO: 48695 - DNA, 20 bp, synthetic construct
  misc_feature 1..20: note = chemically synthesized
  source 1..20: mol_type = other DNA
ggaaaacaaaggcccagaga

SEQ ID NO: 48696 - DNA, 20 bp, synthetic construct
  misc_feature 1..20: note = chemically synthesized
  source 1..20: mol_type = other DNA
gaaaacaaaggcccagagag

SEQ ID NO: 48697 - DNA, 20 bp, synthetic construct
  misc_feature 1..20: note = chemically synthesized
  source 1..20: mol_type = other DNA
aacaaaggcccagagagggg

SEQ ID NO: 48698 - DNA, 20 bp, synthetic construct
  misc_feature 1..20: note = chemically synthesized
  source 1..20: mol_type = other DNA
cagagaggggaagaaatgcc

SEQ ID NO: 48699 - DNA, 20 bp, synthetic construct
  misc_feature 1..20: note = chemically synthesized
  source 1..20: mol_type = other DNA
agagaggggaagaaatgccc

SEQ ID NO: 48700 - DNA, 20 bp, synthetic construct
  misc_feature 1..20: note = chemically synthesized
  source 1..20: mol_type = other DNA
agaggggaagaaatgcccag

SEQ ID NO: 48701 - DNA, 20 bp, synthetic construct
  misc_feature 1..20: note = chemically synthesized
  source 1..20: mol_type = other DNA
agaaatgcccaggagctacc

SEQ ID NO: 48702 - DNA, 20 bp, synthetic construct
  misc_feature 1..20: note = chemically synthesized
  source 1..20: mol_type = other DNA
gaaatgcccaggagctaccg

SEQ ID NO: 48703 - DNA, 20 bp, synthetic construct
  misc_feature 1..20: note = chemically synthesized
  source 1..20: mol_type = other DNA
aaatgcccaggagctaccga

SEQ ID NO: 48704 - DNA, 20 bp, synthetic construct
  misc_feature 1..20: note = chemically synthesized
  source 1..20: mol_type = other DNA
tgcccaggagctaccgaggg

SEQ ID NO: 48705 - DNA, 20 bp, synthetic construct
  misc_feature 1..20: note = chemically synthesized
  source 1..20: mol_type = other DNA
gcccaggagctaccgagggc

SEQ ID NO: 48706 - DNA, 20 bp, synthetic construct
  misc_feature 1..20: note = chemically synthesized
  source 1..20: mol_type = other DNA
agggcaggcgacctcaacca

SEQ ID NO: 48707 - DNA, 20 bp, synthetic construct
  misc_feature 1..20: note = chemically synthesized
  source 1..20: mol_type = other DNA
aggcgacctcaaccacagcc

SEQ ID NO: 48708 - DNA, 20 bp, synthetic construct
  misc_feature 1..20: note = chemically synthesized
  source 1..20: mol_type = other DNA
cctcaaccacagcccagtgc

SEQ ID NO: 48709 - DNA, 20 bp, synthetic construct
  misc_feature 1..20: note = chemically synthesized
  source 1..20: mol_type = other DNA
tcaaccacagcccagtgctg

SEQ ID NO: 48710 - DNA, 20 bp, synthetic construct
  misc_feature 1..20: note = chemically synthesized
  source 1..20: mol_type = other DNA
cagcccagtgctggagctgt

SEQ ID NO: 48711 - DNA, 20 bp, synthetic construct
  misc_feature 1..20: note = chemically synthesized
  source 1..20: mol_type = other DNA
cccagtgctggagctgtgag

SEQ ID NO: 48712 - DNA, 20 bp, synthetic construct
  misc_feature 1..20: note = chemically synthesized
  source 1..20: mol_type = other DNA
gctggagctgtgagtggatg

SEQ ID NO: 48713 - DNA, 20 bp, synthetic construct
  misc_feature 1..20: note = chemically synthesized
  source 1..20: mol_type = other DNA
tggagctgtgagtggatgta

SEQ ID NO: 48714 - DNA, 20 bp, synthetic construct
  misc_feature 1..20: note = chemically synthesized
  source 1..20: mol_type = other DNA
agctgtgagtggatgtagag

SEQ ID NO: 48715 - DNA, 20 bp, synthetic construct
  misc_feature 1..20: note = chemically synthesized
  source 1..20: mol_type = other DNA
tgtgagtggatgtagagcag

SEQ ID NO: 48716 - DNA, 20 bp, synthetic construct
  misc_feature 1..20: note = chemically synthesized
  source 1..20: mol_type = other DNA
agagcagcggaatatccatt

SEQ ID NO: 48717 - DNA, 20 bp, synthetic construct
  misc_feature 1..20: note = chemically synthesized
  source 1..20: mol_type = other DNA
cagcggaatatccattcagc

SEQ ID NO: 48718 - DNA, 20 bp, synthetic construct
  misc_feature 1..20: note = chemically synthesized
  source 1..20: mol_type = other DNA
gaatatccattcagccagct

SEQ ID NO: 48719 - DNA, 20 bp, synthetic construct
  misc_feature 1..20: note = chemically synthesized
  source 1..20: mol_type = other DNA
aatatccattcagccagctc

SEQ ID NO: 48720 - DNA, 20 bp, synthetic construct
  misc_feature 1..20: note = chemically synthesized
  source 1..20: mol_type = other DNA
atatccattcagccagctca

SEQ ID NO: 48721 - DNA, 20 bp, synthetic construct
  misc_feature 1..20: note = chemically synthesized
  source 1..20: mol_type = other DNA
tatccattcagccagctcag

SEQ ID NO: 48722 - DNA, 20 bp, synthetic construct
  misc_feature 1..20: note = chemically synthesized
  source 1..20: mol_type = other DNA
ccattcagccagctcagggg

SEQ ID NO: 48723 - DNA, 20 bp, synthetic construct
  misc_feature 1..20: note = chemically synthesized
  source 1..20: mol_type = other DNA
cattcagccagctcagggga

SEQ ID NO: 48724 - DNA, 20 bp, synthetic construct
  misc_feature 1..20: note = chemically synthesized
  source 1..20: mol_type = other DNA
cagccagctcaggggaagga

SEQ ID NO: 48725 - DNA, 20 bp, synthetic construct
  misc_feature 1..20: note = chemically synthesized
  source 1..20: mol_type = other DNA
agccagctcaggggaaggac

SEQ ID NO: 48726 - DNA, 20 bp, synthetic construct
  misc_feature 1..20: note = chemically synthesized
  source 1..20: mol_type = other DNA
gccagctcaggggaaggaca

SEQ ID NO: 48727 - DNA, 20 bp, synthetic construct
  misc_feature 1..20: note = chemically synthesized
  source 1..20: mol_type = other DNA
ccagctcaggggaaggacag

SEQ ID NO: 48728 - DNA, 20 bp, synthetic construct
  misc_feature 1..20: note = chemically synthesized
  source 1..20: mol_type = other DNA
ggggaaggacaggggccctg

SEQ ID NO: 48729 - DNA, 20 bp, synthetic construct
  misc_feature 1..20: note = chemically synthesized
  source 1..20: mol_type = other DNA
aaggacaggggccctgaagc

SEQ ID NO: 48730 - DNA, 20 bp, synthetic construct
  misc_feature 1..20: note = chemically synthesized
  source 1..20: mol_type = other DNA
aggacaggggccctgaagcc

SEQ ID NO: 48731 - DNA, 20 bp, synthetic construct
  misc_feature 1..20: note = chemically synthesized
  source 1..20: mol_type = other DNA
ggacaggggccctgaagcca

SEQ ID NO: 48732 - DNA, 20 bp, synthetic construct
  misc_feature 1..20: note = chemically synthesized
  source 1..20: mol_type = other DNA
gacaggggccctgaagccag

SEQ ID NO: 48733 - DNA, 20 bp, synthetic construct
  misc_feature 1..20: note = chemically synthesized
  source 1..20: mol_type = other DNA
ggggccctgaagccagggga

SEQ ID NO: 48734 - DNA, 20 bp, synthetic construct
  misc_feature 1..20: note = chemically synthesized
  source 1..20: mol_type = other DNA
ggccctgaagccaggggatg

SEQ ID NO: 48735 - DNA, 20 bp, synthetic construct
  misc_feature 1..20: note = chemically synthesized
  source 1..20: mol_type = other DNA
gaagccaggggatggagctg

SEQ ID NO: 48736 - DNA, 20 bp, synthetic construct
  misc_feature 1..20: note = chemically synthesized
  source 1..20: mol_type = other DNA
aagccaggggatggagctgc

SEQ ID NO: 48737 - DNA, 20 bp, synthetic construct
  misc_feature 1..20: note = chemically synthesized
  source 1..20: mol_type = other DNA
agccaggggatggagctgca

SEQ ID NO: 48738 - DNA, 20 bp, synthetic construct
  misc_feature 1..20: note = chemically synthesized
  source 1..20: mol_type = other DNA
caggggatggagctgcaggg

SEQ ID NO: 48739 - DNA, 20 bp, synthetic construct
  misc_feature 1..20: note = chemically synthesized
  source 1..20: mol_type = other DNA
aggggatggagctgcaggga

SEQ ID NO: 48740 - DNA, 20 bp, synthetic construct
  misc_feature 1..20: note = chemically synthesized
  source 1..20: mol_type = other DNA
ggggatggagctgcagggaa

SEQ ID NO: 48741 - DNA, 20 bp, synthetic construct
  misc_feature 1..20: note = chemically synthesized
  source 1..20: mol_type = other DNA
ggatggagctgcagggaagg

SEQ ID NO: 48742 - DNA, 20 bp, synthetic construct
  misc_feature 1..20: note = chemically synthesized
  source 1..20: mol_type = other DNA
gagctgcagggaagggagct

SEQ ID NO: 48743 - DNA, 20 bp, synthetic construct
  misc_feature 1..20: note = chemically synthesized
  source 1..20: mol_type = other DNA
gctgcagggaagggagctca

SEQ ID NO: 48744 - DNA, 20 bp, synthetic construct
  misc_feature 1..20: note = chemically synthesized
  source 1..20: mol_type = other DNA
tgcagggaagggagctcaga

SEQ ID NO: 48745 - DNA, 20 bp, synthetic construct
  misc_feature 1..20: note = chemically synthesized
  source 1..20: mol_type = other DNA
agggaagggagctcagagag

SEQ ID NO: 48746 - DNA, 20 bp, synthetic construct
  misc_feature 1..20: note = chemically synthesized
  source 1..20: mol_type = other DNA
gggaagggagctcagagaga

SEQ ID NO: 48747 - DNA, 20 bp, synthetic construct
  misc_feature 1..20: note = chemically synthesized
  source 1..20: mol_type = other DNA
ggaagggagctcagagagaa

SEQ ID NO: 48748 - DNA, 20 bp, synthetic construct
  misc_feature 1..20: note = chemically synthesized
  source 1..20: mol_type = other DNA
gaagggagctcagagagaag

SEQ ID NO: 48749 - DNA, 20 bp, synthetic construct
  misc_feature 1..20: note = chemically synthesized
  source 1..20: mol_type = other DNA
agggagctcagagagaaggg

SEQ ID NO: 48750 - DNA, 20 bp, synthetic construct
  misc_feature 1..20: note = chemically synthesized
  source 1..20: mol_type = other DNA
gggagctcagagagaagggg

SEQ ID NO: 48751 - DNA, 20 bp, synthetic construct
  misc_feature 1..20: note = chemically synthesized
  source 1..20: mol_type = other DNA
ggagctcagagagaagggga

SEQ ID NO: 48752 - DNA, 20 bp, synthetic construct
  misc_feature 1..20: note = chemically synthesized
  source 1..20: mol_type = other DNA
gagctcagagagaaggggag

SEQ ID NO: 48753 - DNA, 20 bp, synthetic construct
  misc_feature 1..20: note = chemically synthesized
  source 1..20: mol_type = other DNA
gctcagagagaaggggaggg

SEQ ID NO: 48754 - DNA, 20 bp, synthetic construct
  misc_feature 1..20: note = chemically synthesized
  source 1..20: mol_type = other DNA
agagaaggggaggggagtct

SEQ ID NO: 48755 - DNA, 20 bp, synthetic construct
  misc_feature 1..20: note = chemically synthesized
  source 1..20: mol_type = other DNA
aggggaggggagtctgagct

SEQ ID NO: 48756 - DNA, 20 bp, synthetic construct
  misc_feature 1..20: note = chemically synthesized
  source 1..20: mol_type = other DNA
ctcagtttcccgctgcctga

SEQ ID NO: 48757 - DNA, 20 bp, synthetic construct
  misc_feature 1..20: note = chemically synthesized
  source 1..20: mol_type = other DNA
tcagtttcccgctgcctgaa

SEQ ID NO: 48758 - DNA, 20 bp, synthetic construct
  misc_feature 1..20: note = chemically synthesized
  source 1..20: mol_type = other DNA
agtttcccgctgcctgaaag

SEQ ID NO: 48759 - DNA, 20 bp, synthetic construct
  misc_feature 1..20: note = chemically synthesized
  source 1..20: mol_type = other DNA
gtttcccgctgcctgaaagg

SEQ ID NO: 48760 - DNA, 20 bp, synthetic construct
  misc_feature 1..20: note = chemically synthesized
  source 1..20: mol_type = other DNA
tttcccgctgcctgaaagga

SEQ ID NO: 48761 - DNA, 20 bp, synthetic construct
  misc_feature 1..20: note = chemically synthesized
  source 1..20: mol_type = other DNA
cccgctgcctgaaaggaggg

SEQ ID NO: 48762 - DNA, 20 bp, synthetic construct
  misc_feature 1..20: note = chemically synthesized
  source 1..20: mol_type = other DNA
ggtggtacctactcccttca

SEQ ID NO: 48763 - DNA, 20 bp, synthetic construct
  misc_feature 1..20: note = chemically synthesized
  source 1..20: mol_type = other DNA
gtggtacctactcccttcac

SEQ ID NO: 48764 - DNA, 20 bp, synthetic construct
  misc_feature 1..20: note = chemically synthesized
  source 1..20: mol_type = other DNA
tggtacctactcccttcaca

SEQ ID NO: 48765 - DNA, 20 bp, synthetic construct
  misc_feature 1..20: note = chemically synthesized
  source 1..20: mol_type = other DNA
ccttcacagggtaactgaat

SEQ ID NO: 48766 - DNA, 20 bp, synthetic construct
  misc_feature 1..20: note = chemically synthesized
  source 1..20: mol_type = other DNA
ttcacagggtaactgaatga

SEQ ID NO: 48767 - DNA, 20 bp, synthetic construct
  misc_feature 1..20: note = chemically synthesized
  source 1..20: mol_type = other DNA
taactgaatgagagactgcc

SEQ ID NO: 48768 - DNA, 20 bp, synthetic construct
  misc_feature 1..20: note = chemically synthesized
  source 1..20: mol_type = other DNA
actgaatgagagactgcctg

SEQ ID NO: 48769 - DNA, 20 bp, synthetic construct
  misc_feature 1..20: note = chemically synthesized
  source 1..20: mol_type = other DNA
ctgaatgagagactgcctgg

SEQ ID NO: 48770 - DNA, 20 bp, synthetic construct
  misc_feature 1..20: note = chemically synthesized
  source 1..20: mol_type = other DNA
atgagagactgcctggagga

SEQ ID NO: 48771 - DNA, 20 bp, synthetic construct
  misc_feature 1..20: note = chemically synthesized
  source 1..20: mol_type = other DNA
tgcctggaggaaagctcttc

SEQ ID NO: 48772 - DNA, 20 bp, synthetic construct
  misc_feature 1..20: note = chemically synthesized
  source 1..20: mol_type = other DNA
ggaggaaagctcttcaagtg

SEQ ID NO: 48773 - DNA, 20 bp, synthetic construct
  misc_feature 1..20: note = chemically synthesized
  source 1..20: mol_type = other DNA
aagtgtggcccaccccaccc

SEQ ID NO: 48774 - DNA, 20 bp, synthetic construct
  misc_feature 1..20: note = chemically synthesized
  source 1..20: mol_type = other DNA
ccaccccaccccagtgacac

SEQ ID NO: 48775 - DNA, 20 bp, synthetic construct
  misc_feature 1..20: note = chemically synthesized
  source 1..20: mol_type = other DNA
agtgacaccagcccctgaca

SEQ ID NO: 48776 - DNA, 20 bp, synthetic construct
  misc_feature 1..20: note = chemically synthesized
  source 1..20: mol_type = other DNA
gtgacaccagcccctgacac

SEQ ID NO: 48777 - DNA, 20 bp, synthetic construct
  misc_feature 1..20: note = chemically synthesized
  source 1..20: mol_type = other DNA
tgacaccagcccctgacacg

SEQ ID NO: 48778 - DNA, 20 bp, synthetic construct
  misc_feature 1..20: note = chemically synthesized
  source 1..20: mol_type = other DNA
gacaccagcccctgacacgg

SEQ ID NO: 48779 - DNA, 20 bp, synthetic construct
  misc_feature 1..20: note = chemically synthesized
  source 1..20: mol_type = other DNA
caccagcccctgacacgggg

SEQ ID NO: 48780 - DNA, 20 bp, synthetic construct
  misc_feature 1..20: note = chemically synthesized
  source 1..20: mol_type = other DNA
accagcccctgacacggggg

SEQ ID NO: 48781 - DNA, 20 bp, synthetic construct
  misc_feature 1..20: note = chemically synthesized
  source 1..20: mol_type = other DNA
ccagcccctgacacggggga

SEQ ID NO: 48782 - DNA, 20 bp, synthetic construct
  misc_feature 1..20: note = chemically synthesized
  source 1..20: mol_type = other DNA
agcccctgacacgggggagg

SEQ ID NO: 48783 - DNA, 20 bp, synthetic construct
  misc_feature 1..20: note = chemically synthesized
  source 1..20: mol_type = other DNA
gcccctgacacgggggaggg

SEQ ID NO: 48784 - DNA, 20 bp, synthetic construct
  misc_feature 1..20: note = chemically synthesized
  source 1..20: mol_type = other DNA
cccctgacacgggggaggga

SEQ ID NO: 48785 - DNA, 20 bp, synthetic construct
  misc_feature 1..20: note = chemically synthesized
  source 1..20: mol_type = other DNA
ctgacacgggggagggaggg

SEQ ID NO: 48786 - DNA, 20 bp, synthetic construct
  misc_feature 1..20: note = chemically synthesized
  source 1..20: mol_type = other DNA
cgggggagggagggcagcat

SEQ ID NO: 48787 - DNA, 20 bp, synthetic construct
  misc_feature 1..20: note = chemically synthesized
  source 1..20: mol_type = other DNA
gggggagggagggcagcatc

SEQ ID NO: 48788 - DNA, 20 bp, synthetic construct
  misc_feature 1..20: note = chemically synthesized
  source 1..20: mol_type = other DNA
gggagggagggcagcatcag

SEQ ID NO: 48789 - DNA, 20 bp, synthetic construct
  misc_feature 1..20: note = chemically synthesized
  source 1..20: mol_type = other DNA
ggagggagggcagcatcagg

SEQ ID NO: 48790 - DNA, 20 bp, synthetic construct
  misc_feature 1..20: note = chemically synthesized
  source 1..20: mol_type = other DNA
gagggagggcagcatcagga

SEQ ID NO: 48791 - DNA, 20 bp, synthetic construct
  misc_feature 1..20: note = chemically synthesized
  source 1..20: mol_type = other DNA
agggagggcagcatcaggag

SEQ ID NO: 48792 - DNA, 20 bp, synthetic construct
  misc_feature 1..20: note = chemically synthesized
  source 1..20: mol_type = other DNA
cagcatcaggaggggctttc

SEQ ID NO: 48793 - DNA, 20 bp, synthetic construct
  misc_feature 1..20: note = chemically synthesized
  source 1..20: mol_type = other DNA
agcatcaggaggggctttct

SEQ ID NO: 48794 - DNA, 20 bp, synthetic construct
  misc_feature 1..20: note = chemically synthesized
  source 1..20: mol_type = other DNA
aggggctttctgggcacacc

SEQ ID NO: 48795 - DNA, 20 bp, synthetic construct
  misc_feature 1..20: note = chemically synthesized
  source 1..20: mol_type = other DNA
cacacccagtacccgtctct

SEQ ID NO: 48796 - DNA, 20 bp, synthetic construct
  misc_feature 1..20: note = chemically synthesized
  source 1..20: mol_type = other DNA
ctgttgcattttaatcctca

SEQ ID NO: 48797 - DNA, 20 bp, synthetic construct
  misc_feature 1..20: note = chemically synthesized
  source 1..20: mol_type = other DNA
ttgcattttaatcctcacag

SEQ ID NO: 48798 - DNA, 20 bp, synthetic construct
  misc_feature 1..20: note = chemically synthesized
  source 1..20: mol_type = other DNA
aatcctcacagcagctcaac

SEQ ID NO: 48799 - DNA, 20 bp, synthetic construct
  misc_feature 1..20: note = chemically synthesized
  source 1..20: mol_type = other DNA
atcctcacagcagctcaaca

SEQ ID NO: 48800 - DNA, 20 bp, synthetic construct
  misc_feature 1..20: note = chemically synthesized
  source 1..20: mol_type = other DNA
ccgtcaccatccccatttta

SEQ ID NO: 48801 - DNA, 20 bp, synthetic construct
  misc_feature 1..20: note = chemically synthesized
  source 1..20: mol_type = other DNA
caccatccccattttacaga

SEQ ID NO: 48802 - DNA, 20 bp, synthetic construct
  misc_feature 1..20: note = chemically synthesized
  source 1..20: mol_type = other DNA
accatccccattttacagat

SEQ ID NO: 48803 - DNA, 20 bp, synthetic construct
  misc_feature 1..20: note = chemically synthesized
  source 1..20: mol_type = other DNA
ccatccccattttacagata

SEQ ID NO: 48804 - DNA, 20 bp, synthetic construct
  misc_feature 1..20: note = chemically synthesized
  source 1..20: mol_type = other DNA
attttacagatagggaaatt

SEQ ID NO: 48805 - DNA, 20 bp, synthetic construct
  misc_feature 1..20: note = chemically synthesized
  source 1..20: mol_type = other DNA
ttttacagatagggaaattg

SEQ ID NO: 48806 - DNA, 20 bp, synthetic construct
  misc_feature 1..20: note = chemically synthesized
  source 1..20: mol_type = other DNA
cagatagggaaattgaggct

SEQ ID NO: 48807 - DNA, 20 bp, synthetic construct
  misc_feature 1..20: note = chemically synthesized
  source 1..20: mol_type = other DNA
gatagggaaattgaggctcg

SEQ ID NO: 48808 - DNA, 20 bp, synthetic construct
  misc_feature 1..20: note = chemically synthesized
  source 1..20: mol_type = other DNA
agggaaattgaggctcggag

SEQ ID NO: 48809 - DNA, 20 bp, synthetic construct
  misc_feature 1..20: note = chemically synthesized
  source 1..20: mol_type = other DNA
agcggttaaacaactcacct

SEQ ID NO: 48810 - DNA, 20 bp, synthetic construct
  misc_feature 1..20: note = chemically synthesized
  source 1..20: mol_type = other DNA
gcggttaaacaactcacctg

SEQ ID NO: 48811 - DNA, 20 bp, synthetic construct
  misc_feature 1..20: note = chemically synthesized
  source 1..20: mol_type = other DNA
acaactcacctgaggcctca

SEQ ID NO: 48812 - DNA, 20 bp, synthetic construct
  misc_feature 1..20: note = chemically synthesized
  source 1..20: mol_type = other DNA
ctcacctgaggcctcacagc

SEQ ID NO: 48813 - DNA, 20 bp, synthetic construct
  misc_feature 1..20: note = chemically synthesized
  source 1..20: mol_type = other DNA
cctgaggcctcacagccagt

SEQ ID NO: 48814 - DNA, 20 bp, synthetic construct
  misc_feature 1..20: note = chemically synthesized
  source 1..20: mol_type = other DNA
gaggcctcacagccagtaag

SEQ ID NO: 48815 - DNA, 20 bp, synthetic construct
  misc_feature 1..20: note = chemically synthesized
  source 1..20: mol_type = other DNA
aggcctcacagccagtaagt

SEQ ID NO: 48816 - DNA, 20 bp, synthetic construct
  misc_feature 1..20: note = chemically synthesized
  source 1..20: mol_type = other DNA
cagccagtaagtgggttccc

SEQ ID NO: 48817 - DNA, 20 bp, synthetic construct
  misc_feature 1..20: note = chemically synthesized
  source 1..20: mol_type = other DNA
cctggtctgaatgtgtgtgc

SEQ ID NO: 48818 - DNA, 20 bp, synthetic construct
  misc_feature 1..20: note = chemically synthesized
  source 1..20: mol_type = other DNA
tggtctgaatgtgtgtgctg

SEQ ID NO: 48819 - DNA, 20 bp, synthetic construct
  misc_feature 1..20: note = chemically synthesized
  source 1..20: mol_type = other DNA
ggtctgaatgtgtgtgctgg

SEQ ID NO: 48820 - DNA, 20 bp, synthetic construct
  misc_feature 1..20: note = chemically synthesized
  source 1..20: mol_type = other DNA
gtgtgtgctggaggatcctg

SEQ ID NO: 48821 - DNA, 20 bp, synthetic construct
  misc_feature 1..20: note = chemically synthesized
  source 1..20: mol_type = other DNA
tgtgtgctggaggatcctgt

SEQ ID NO: 48822 - DNA, 20 bp, synthetic construct
  misc_feature 1..20: note = chemically synthesized
  source 1..20: mol_type = other DNA
gatcctgtgggtcactcgcc

SEQ ID NO: 48823 - DNA, 20 bp, synthetic construct
  misc_feature 1..20: note = chemically synthesized
  source 1..20: mol_type = other DNA
cctgtgggtcactcgcctgg

SEQ ID NO: 48824 - DNA, 20 bp, synthetic construct
  misc_feature 1..20: note = chemically synthesized
  source 1..20: mol_type = other DNA
tgtgggtcactcgcctggta

SEQ ID NO: 48825 - DNA, 20 bp, synthetic construct
  misc_feature 1..20: note = chemically synthesized
  source 1..20: mol_type = other DNA
cactcgcctggtagagcccc

SEQ ID NO: 48826 - DNA, 20 bp, synthetic construct
  misc_feature 1..20: note = chemically synthesized
  source 1..20: mol_type = other DNA
actcgcctggtagagcccca

SEQ ID NO: 48827 - DNA, 20 bp, synthetic construct
  misc_feature 1..20: note = chemically synthesized
  source 1..20: mol_type = other DNA
cgcctggtagagccccaagg

SEQ ID NO: 48828 - DNA, 20 bp, synthetic construct
  misc_feature 1..20: note = chemically synthesized
  source 1..20: mol_type = other DNA
cctggtagagccccaaggtg

SEQ ID NO: 48829 - DNA, 20 bp, synthetic construct
  misc_feature 1..20: note = chemically synthesized
  source 1..20: mol_type = other DNA
ctggtagagccccaaggtgg

SEQ ID NO: 48830 - DNA, 20 bp, synthetic construct
  misc_feature 1..20: note = chemically synthesized
  source 1..20: mol_type = other DNA
ccccaaggtggaggcataaa

SEQ ID NO: 48831 - DNA, 20 bp, synthetic construct
  misc_feature 1..20: note = chemically synthesized
  source 1..20: mol_type = other DNA
cccaaggtggaggcataaat

SEQ ID NO: 48832 - DNA, 20 bp, synthetic construct
  misc_feature 1..20: note = chemically synthesized
  source 1..20: mol_type = other DNA
ggtggaggcataaatgggac

SEQ ID NO: 48833 - DNA, 20 bp, synthetic construct
  misc_feature 1..20: note = chemically synthesized
  source 1..20: mol_type = other DNA
taaatgggactggtgaatga

SEQ ID NO: 48834 - DNA, 20 bp, synthetic construct
  misc_feature 1..20: note = chemically synthesized
  source 1..20: mol_type = other DNA
atgggactggtgaatgacag

SEQ ID NO: 48835 - DNA, 20 bp, synthetic construct
  misc_feature 1..20: note = chemically synthesized
  source 1..20: mol_type = other DNA
tgggactggtgaatgacaga

SEQ ID NO: 48836 - DNA, 20 bp, synthetic construct
  misc_feature 1..20: note = chemically synthesized
  source 1..20: mol_type = other DNA
gggactggtgaatgacagaa

SEQ ID NO: 48837 - DNA, 20 bp, synthetic construct
  misc_feature 1..20: note = chemically synthesized
  source 1..20: mol_type = other DNA
ggactggtgaatgacagaag

SEQ ID NO: 48838 - DNA, 20 bp, synthetic construct
  misc_feature 1..20: note = chemically synthesized
  source 1..20: mol_type = other DNA
cactcatccattcactctgc

SEQ ID NO: 48839 - DNA, 20 bp, synthetic construct
  misc_feature 1..20: note = chemically synthesized
  source 1..20: mol_type = other DNA
attcactctgcaagtatcta

SEQ ID NO: 48840 - DNA, 20 bp, synthetic construct
  misc_feature 1..20: note = chemically synthesized
  source 1..20: mol_type = other DNA
agtatctacggcacgtacgc

SEQ ID NO: 48841 - DNA, 20 bp, synthetic construct
  misc_feature 1..20: note = chemically synthesized
  source 1..20: mol_type = other DNA
cggcacgtacgccagctccc

SEQ ID NO: 48842 - DNA, 20 bp, synthetic construct
  misc_feature 1..20: note = chemically synthesized
  source 1..20: mol_type = other DNA
cacgtacgccagctcccaag

SEQ ID NO: 48843 - DNA, 20 bp, synthetic construct
  misc_feature 1..20: note = chemically synthesized
  source 1..20: mol_type = other DNA
acgtacgccagctcccaagc

SEQ ID NO: 48844 - DNA, 20 bp, synthetic construct
  misc_feature 1..20: note = chemically synthesized
  source 1..20: mol_type = other DNA
ccagctcccaagcaggtttg

SEQ ID NO: 48845 - DNA, 20 bp, synthetic construct
  misc_feature 1..20: note = chemically synthesized
  source 1..20: mol_type = other DNA
cagctcccaagcaggtttgc

SEQ ID NO: 48846 - DNA, 20 bp, synthetic construct
  misc_feature 1..20: note = chemically synthesized
  source 1..20: mol_type = other DNA
aagcaggtttgcgggttgca

SEQ ID NO: 48847 - DNA, 20 bp, synthetic construct
  misc_feature 1..20: note = chemically synthesized
  source 1..20: mol_type = other DNA
caggtttgcgggttgcacag

SEQ ID NO: 48848 - DNA, 20 bp, synthetic construct
  misc_feature 1..20: note = chemically synthesized
  source 1..20: mol_type = other DNA
aggtttgcgggttgcacagc

SEQ ID NO: 48849 - DNA, 20 bp, synthetic construct
  misc_feature 1..20: note = chemically synthesized
  source 1..20: mol_type = other DNA
gcgggcgatgcaatctgatt

SEQ ID NO: 48850 - DNA, 20 bp, synthetic construct
  misc_feature 1..20: note = chemically synthesized
  source 1..20: mol_type = other DNA
cgggcgatgcaatctgattt

SEQ ID NO: 48851 - DNA, 20 bp, synthetic construct
  misc_feature 1..20: note = chemically synthesized
  source 1..20: mol_type = other DNA
caatctgatttaggctttta

SEQ ID NO: 48852 - DNA, 20 bp, synthetic construct
  misc_feature 1..20: note = chemically synthesized
  source 1..20: mol_type = other DNA
aatctgatttaggcttttaa

SEQ ID NO: 48853 - DNA, 20 bp, synthetic construct
  misc_feature 1..20: note = chemically synthesized
  source 1..20: mol_type = other DNA
atctgatttaggcttttaaa

SEQ ID NO: 48854 - DNA, 20 bp, synthetic construct
  misc_feature 1..20: note = chemically synthesized
  source 1..20: mol_type = other DNA
cttttaaagggattgcaatc

SEQ ID NO: 48855 - DNA, 20 bp, synthetic construct
  misc_feature 1..20: note = chemically synthesized
  source 1..20: mol_type = other DNA
ttaaagggattgcaatcaag

SEQ ID NO: 48856 - DNA, 20 bp, synthetic construct
  misc_feature 1..20: note = chemically synthesized
  source 1..20: mol_type = other DNA
taaagggattgcaatcaagt

SEQ ID NO: 48857 - DNA, 20 bp, synthetic construct
  misc_feature 1..20: note = chemically synthesized
  source 1..20: mol_type = other DNA
aaagggattgcaatcaagtg

SEQ ID NO: 48858 - DNA, 20 bp, synthetic construct
  misc_feature 1..20: note = chemically synthesized
  source 1..20: mol_type = other DNA
gcaatcaagtggggccccac

SEQ ID NO: 48859 - DNA, 20 bp, synthetic construct
  misc_feature 1..20: note = chemically synthesized
  source 1..20: mol_type = other DNA
cctcccctcccctccacccc

SEQ ID NO: 48860 - DNA, 20 bp, synthetic construct
  misc_feature 1..20: note = chemically synthesized
  source 1..20: mol_type = other DNA
cccctcccctccacccccag

SEQ ID NO: 48861 - DNA, 20 bp, synthetic construct
  misc_feature 1..20: note = chemically synthesized
  source 1..20: mol_type = other DNA
tccacccccagcagtctcca

SEQ ID NO: 48862 - DNA, 20 bp, synthetic construct
  misc_feature 1..20: note = chemically synthesized
  source 1..20: mol_type = other DNA
ccacccccagcagtctccaa

SEQ ID NO: 48863 - DNA, 20 bp, synthetic construct
  misc_feature 1..20: note = chemically synthesized
  source 1..20: mol_type = other DNA
ccaaaggcctccaacaaccc

SEQ ID NO: 48864 - DNA, 20 bp, synthetic construct
  misc_feature 1..20: note = chemically synthesized
  source 1..20: mol_type = other DNA
aaaggcctccaacaacccca

SEQ ID NO: 48865 - DNA, 20 bp, synthetic construct
  misc_feature 1..20: note = chemically synthesized
  source 1..20: mol_type = other DNA
ggcctccaacaaccccagag

SEQ ID NO: 48866 - DNA, 20 bp, synthetic construct
  misc_feature 1..20: note = chemically synthesized
  source 1..20: mol_type = other DNA
gcctccaacaaccccagagt

SEQ ID NO: 48867 - DNA, 20 bp, synthetic construct
  misc_feature 1..20: note = chemically synthesized
  source 1..20: mol_type = other DNA
cctccaacaaccccagagtg

SEQ ID NO: 48868 - DNA, 20 bp, synthetic construct
  misc_feature 1..20: note = chemically synthesized
  source 1..20: mol_type = other DNA
ctccaacaaccccagagtgg

SEQ ID NO: 48869 - DNA, 20 bp, synthetic construct
  misc_feature 1..20: note = chemically synthesized
  source 1..20: mol_type = other DNA
gagtgggggccatgtatcca

SEQ ID NO: 48870 - DNA, 20 bp, synthetic construct
  misc_feature 1..20: note = chemically synthesized
  source 1..20: mol_type = other DNA
catgtatccaaagaaactcc

SEQ ID NO: 48871 - DNA, 20 bp, synthetic construct
  misc_feature 1..20: note = chemically synthesized
  source 1..20: mol_type = other DNA
aagaaactccaagctgtata

SEQ ID NO: 48872 - DNA, 20 bp, synthetic construct
  misc_feature 1..20: note = chemically synthesized
  source 1..20: mol_type = other DNA
aagctgtatacggatcacac

SEQ ID NO: 48873 - DNA, 20 bp, synthetic construct
  misc_feature 1..20: note = chemically synthesized
  source 1..20: mol_type = other DNA
tacggatcacactggttttc

SEQ ID NO: 48874 - DNA, 20 bp, synthetic construct
  misc_feature 1..20: note = chemically synthesized
  source 1..20: mol_type = other DNA
acggatcacactggttttcc

SEQ ID NO: 48875 - DNA, 20 bp, synthetic construct
  misc_feature 1..20: note = chemically synthesized
  source 1..20: mol_type = other DNA
ggatcacactggttttccag

SEQ ID NO: 48876 - DNA, 20 bp, synthetic construct
  misc_feature 1..20: note = chemically synthesized
  source 1..20: mol_type = other DNA
tggttttccaggagcaaaaa

SEQ ID NO: 48877 - DNA, 20 bp, synthetic construct
  misc_feature 1..20: note = chemically synthesized
  source 1..20: mol_type = other DNA
tccaggagcaaaaacagaaa

SEQ ID NO: 48878 - DNA, 20 bp, synthetic construct
  misc_feature 1..20: note = chemically synthesized
  source 1..20: mol_type = other DNA
ccaggagcaaaaacagaaac

SEQ ID NO: 48879 - DNA, 20 bp, synthetic construct
  misc_feature 1..20: note = chemically synthesized
  source 1..20: mol_type = other DNA
gcaaaaacagaaacaggcct

SEQ ID NO: 48880 - DNA, 20 bp, synthetic construct
  misc_feature 1..20: note = chemically synthesized
  source 1..20: mol_type = other DNA
caaaaacagaaacaggcctg

SEQ ID NO: 48881 - DNA, 20 bp, synthetic construct
  misc_feature 1..20: note = chemically synthesized
  source 1..20: mol_type = other DNA
aacagaaacaggcctgaggc

SEQ ID NO: 48882 - DNA, 20 bp, synthetic construct
  misc_feature 1..20: note = chemically synthesized
  source 1..20: mol_type = other DNA
attgaacctcctcctgctct

SEQ ID NO: 48883 - DNA, 20 bp, synthetic construct
  misc_feature 1..20: note = chemically synthesized
  source 1..20: mol_type = other DNA
gaacctcctcctgctctgag

SEQ ID NO: 48884 - DNA, 20 bp, synthetic construct
  misc_feature 1..20: note = chemically synthesized
  source 1..20: mol_type = other DNA
tcctcctgctctgagcagcc

SEQ ID NO: 48885 - DNA, 20 bp, synthetic construct
  misc_feature 1..20: note = chemically synthesized
  source 1..20: mol_type = other DNA
cctcctgctctgagcagcct

SEQ ID NO: 48886 - DNA, 20 bp, synthetic construct
  misc_feature 1..20: note = chemically synthesized
  source 1..20: mol_type = other DNA
ctcctgctctgagcagcctg

SEQ ID NO: 48887 - DNA, 20 bp, synthetic construct
  misc_feature 1..20: note = chemically synthesized
  source 1..20: mol_type = other DNA
tcctgctctgagcagcctgg

SEQ ID NO: 48888 - DNA, 20 bp, synthetic construct
  misc_feature 1..20: note = chemically synthesized
  source 1..20: mol_type = other DNA
cctgctctgagcagcctggg

SEQ ID NO: 48889 - DNA, 20 bp, synthetic construct
  misc_feature 1..20: note = chemically synthesized
  source 1..20: mol_type = other DNA
gctctgagcagcctgggggg

SEQ ID NO: 48890 - DNA, 20 bp, synthetic construct
  misc_feature 1..20: note = chemically synthesized
  source 1..20: mol_type = other DNA
agcagcctggggggcagact

SEQ ID NO: 48891 - DNA, 20 bp, synthetic construct
  misc_feature 1..20: note = chemically synthesized
  source 1..20: mol_type = other DNA
agcctggggggcagactaag

SEQ ID NO: 48892 - DNA, 20 bp, synthetic construct
  misc_feature 1..20: note = chemically synthesized
  source 1..20: mol_type = other DNA
cctggggggcagactaagca

SEQ ID NO: 48893 - DNA, 20 bp, synthetic construct
  misc_feature 1..20: note = chemically synthesized
  source 1..20: mol_type = other DNA
ctggggggcagactaagcag

SEQ ID NO: 48894 - DNA, 20 bp, synthetic construct
  misc_feature 1..20: note = chemically synthesized
  source 1..20: mol_type = other DNA
tggggggcagactaagcaga

SEQ ID NO: 48895 - DNA, 20 bp, synthetic construct
  misc_feature 1..20: note = chemically synthesized
  source 1..20: mol_type = other DNA
agactaagcagagggctgtg

SEQ ID NO: 48896 - DNA, 20 bp, synthetic construct
  misc_feature 1..20: note = chemically synthesized
  source 1..20: mol_type = other DNA
gggctgtgcagacccacata

SEQ ID NO: 48897 - DNA, 20 bp, synthetic construct
  misc_feature 1..20: note = chemically synthesized
  source 1..20: mol_type = other DNA
gctgtgcagacccacataaa

SEQ ID NO: 48898 - DNA, 20 bp, synthetic construct
  misc_feature 1..20: note = chemically synthesized
  source 1..20: mol_type = other DNA
ataaagagcctactgtgtgc

SEQ ID NO: 48899 - DNA, 20 bp, synthetic construct
  misc_feature 1..20: note = chemically synthesized
  source 1..20: mol_type = other DNA
taaagagcctactgtgtgcc

SEQ ID NO: 48900 - DNA, 20 bp, synthetic construct
  misc_feature 1..20: note = chemically synthesized
  source 1..20: mol_type = other DNA
gtgtgccaggcacttcaccc

SEQ ID NO: 48901 - DNA, 20 bp, synthetic construct
  misc_feature 1..20: note = chemically synthesized
  source 1..20: mol_type = other DNA
tgtgccaggcacttcacccg

SEQ ID NO: 48902 - DNA, 20 bp, synthetic construct
  misc_feature 1..20: note = chemically synthesized
  source 1..20: mol_type = other DNA
cttcacccgaggcacttcac

SEQ ID NO: 48903 - DNA, 20 bp, synthetic construct
  misc_feature 1..20: note = chemically synthesized
  source 1..20: mol_type = other DNA
aggcacttcacaagcatgct

SEQ ID NO: 48904 - DNA, 20 bp, synthetic construct
  misc_feature 1..20: note = chemically synthesized
  source 1..20: mol_type = other DNA
ggcacttcacaagcatgctt

SEQ ID NO: 48905 - DNA, 20 bp, synthetic construct
  misc_feature 1..20: note = chemically synthesized
  source 1..20: mol_type = other DNA
gaatgaaacttccaactctt

SEQ ID NO: 48906 - DNA, 20 bp, synthetic construct
  misc_feature 1..20: note = chemically synthesized
  source 1..20: mol_type = other DNA
aatgaaacttccaactcttt

SEQ ID NO: 48907 - DNA, 20 bp, synthetic construct
  misc_feature 1..20: note = chemically synthesized
  source 1..20: mol_type = other DNA
acttccaactctttgggatg

SEQ ID NO: 48908 - DNA, 20 bp, synthetic construct
  misc_feature 1..20: note = chemically synthesized
  source 1..20: mol_type = other DNA
cttccaactctttgggatgc

SEQ ID NO: 48909 - DNA, 20 bp, synthetic construct
  misc_feature 1..20: note = chemically synthesized
  source 1..20: mol_type = other DNA
tctttgggatgcaggtgaaa

SEQ ID NO: 48910 - DNA, 20 bp, synthetic construct
  misc_feature 1..20: note = chemically synthesized
  source 1..20: mol_type = other DNA
gatgcaggtgaaacagttcc

SEQ ID NO: 48911 - DNA, 20 bp, synthetic construct
  misc_feature 1..20: note = chemically synthesized
  source 1..20: mol_type = other DNA
aggtgaaacagttcctggtt

SEQ ID NO: 48912 - DNA, 20 bp, synthetic construct
  misc_feature 1..20: note = chemically synthesized
  source 1..20: mol_type = other DNA
gtgaaacagttcctggttca

SEQ ID NO: 48913 - DNA, 20 bp, synthetic construct
  misc_feature 1..20: note = chemically synthesized
  source 1..20: mol_type = other DNA
gaaacagttcctggttcaga

SEQ ID NO: 48914 - DNA, 20 bp, synthetic construct
  misc_feature 1..20: note = chemically synthesized
  source 1..20: mol_type = other DNA
aaacagttcctggttcagag

SEQ ID NO: 48915 - DNA, 20 bp, synthetic construct
  misc_feature 1..20: note = chemically synthesized
  source 1..20: mol_type = other DNA
gttcctggttcagagaggtg

SEQ ID NO: 48916 - DNA, 20 bp, synthetic construct
  misc_feature 1..20: note = chemically synthesized
  source 1..20: mol_type = other DNA
cctggttcagagaggtgaag

SEQ ID NO: 48917 - DNA, 20 bp, synthetic construct
  misc_feature 1..20: note = chemically synthesized
  source 1..20: mol_type = other DNA
agaggtgaagcggcctgcct

SEQ ID NO: 48918 - DNA, 20 bp, synthetic construct
  misc_feature 1..20: note = chemically synthesized
  source 1..20: mol_type = other DNA
gaggtgaagcggcctgcctg

SEQ ID NO: 48919 - DNA, 20 bp, synthetic construct
  misc_feature 1..20: note = chemically synthesized
  source 1..20: mol_type = other DNA
gtgaagcggcctgcctgagg

SEQ ID NO: 48920 - DNA, 20 bp, synthetic construct
  misc_feature 1..20: note = chemically synthesized
  source 1..20: mol_type = other DNA
gcggcctgcctgaggcagca

SEQ ID NO: 48921 - DNA, 20 bp, synthetic construct
  misc_feature 1..20: note = chemically synthesized
  source 1..20: mol_type = other DNA
ggcagcacagctcttcttta

SEQ ID NO: 48922 - DNA, 20 bp, synthetic construct
  misc_feature 1..20: note = chemically synthesized
  source 1..20: mol_type = other DNA
cccacctctaccctgtctca

SEQ ID NO: 48923 - DNA, 20 bp, synthetic construct
  misc_feature 1..20: note = chemically synthesized
  source 1..20: mol_type = other DNA
tgtctcacggccccccatgc

SEQ ID NO: 48924 - DNA, 20 bp, synthetic construct
  misc_feature 1..20: note = chemically synthesized
  source 1..20: mol_type = other DNA
ggccccccatgccagcctga

SEQ ID NO: 48925 - DNA, 20 bp, synthetic construct
  misc_feature 1..20: note = chemically synthesized
  source 1..20: mol_type = other DNA
cctgacggttgtgtctgcct

SEQ ID NO: 48926 - DNA, 20 bp, synthetic construct
  misc_feature 1..20: note = chemically synthesized
  source 1..20: mol_type = other DNA
gtcatgctccatttttccat

SEQ ID NO: 48927 - DNA, 20 bp, synthetic construct
  misc_feature 1..20: note = chemically synthesized
  source 1..20: mol_type = other DNA
tcatgctccatttttccatc

SEQ ID NO: 48928 - DNA, 20 bp, synthetic construct
  misc_feature 1..20: note = chemically synthesized
  source 1..20: mol_type = other DNA
atttttccatcgggaccatc

SEQ ID NO: 48929 - DNA, 20 bp, synthetic construct
  misc_feature 1..20: note = chemically synthesized
  source 1..20: mol_type = other DNA
ttttccatcgggaccatcaa

SEQ ID NO: 48930 - DNA, 20 bp, synthetic construct
  misc_feature 1..20: note = chemically synthesized
  source 1..20: mol_type = other DNA
tttccatcgggaccatcaag

SEQ ID NO: 48931 - DNA, 20 bp, synthetic construct
  misc_feature 1..20: note = chemically synthesized
  source 1..20: mol_type = other DNA
ttccatcgggaccatcaaga

SEQ ID NO: 48932 - DNA, 20 bp, synthetic construct
  misc_feature 1..20: note = chemically synthesized
  source 1..20: mol_type = other DNA
tcaagagggtgtttgtgtct

SEQ ID NO: 48933 - DNA, 20 bp, synthetic construct
  misc_feature 1..20: note = chemically synthesized
  source 1..20: mol_type = other DNA
caagagggtgtttgtgtcta

SEQ ID NO: 48934 - DNA, 20 bp, synthetic construct
  misc_feature 1..20: note = chemically synthesized
  source 1..20: mol_type = other DNA
tgtttgtgtctaaggctgac

SEQ ID NO: 48935 - DNA, 20 bp, synthetic construct
  misc_feature 1..20: note = chemically synthesized
  source 1..20: mol_type = other DNA
gtttgtgtctaaggctgact

SEQ ID NO: 48936 - DNA, 20 bp, synthetic construct
  misc_feature 1..20: note = chemically synthesized
  source 1..20: mol_type = other DNA
taaggctgactgggtaactt

SEQ ID NO: 48937 - DNA, 20 bp, synthetic construct
  misc_feature 1..20: note = chemically synthesized
  source 1..20: mol_type = other DNA
ctgactgggtaactttggat

SEQ ID NO: 48938 - DNA, 20 bp, synthetic construct
  misc_feature 1..20: note = chemically synthesized
  source 1..20: mol_type = other DNA
actgggtaactttggatgag

SEQ ID NO: 48939 - DNA, 20 bp, synthetic construct
  misc_feature 1..20: note = chemically synthesized
  source 1..20: mol_type = other DNA
atgagcggtctctccgctct

SEQ ID NO: 48940 - DNA, 20 bp, synthetic construct
  misc_feature 1..20: note = chemically synthesized
  source 1..20: mol_type = other DNA
ctgtttcctcatctgtcaaa

SEQ ID NO: 48941 - DNA, 20 bp, synthetic construct
  misc_feature 1..20: note = chemically synthesized
  source 1..20: mol_type = other DNA
tgtttcctcatctgtcaaat

SEQ ID NO: 48942 - DNA, 20 bp, synthetic construct
  misc_feature 1..20: note = chemically synthesized
  source 1..20: mol_type = other DNA
tctaacccactctgatctcc

SEQ ID NO: 48943 - DNA, 20 bp, synthetic construct
  misc_feature 1..20: note = chemically synthesized
  source 1..20: mol_type = other DNA
ctaacccactctgatctccc

SEQ ID NO: 48944 - DNA, 20 bp, synthetic construct
  misc_feature 1..20: note = chemically synthesized
  source 1..20: mol_type = other DNA
taacccactctgatctccca

SEQ ID NO: 48945 - DNA, 20 bp, synthetic construct
  misc_feature 1..20: note = chemically synthesized
  source 1..20: mol_type = other DNA
cccactctgatctcccaggg

SEQ ID NO: 48946 - DNA, 20 bp, synthetic construct
  misc_feature 1..20: note = chemically synthesized
  source 1..20: mol_type = other DNA
actctgatctcccagggcgg

SEQ ID NO: 48947 - DNA, 20 bp, synthetic construct
  misc_feature 1..20: note = chemically synthesized
  source 1..20: mol_type = other DNA
tgatctcccagggcggcagt

SEQ ID NO: 48948 - DNA, 20 bp, synthetic construct
  misc_feature 1..20: note = chemically synthesized
  source 1..20: mol_type = other DNA
ccagggcggcagtaagtctt

SEQ ID NO: 48949 - DNA, 20 bp, synthetic construct
  misc_feature 1..20: note = chemically synthesized
  source 1..20: mol_type = other DNA
cggcagtaagtcttcagcat

SEQ ID NO: 48950 - DNA, 20 bp, synthetic construct
  misc_feature 1..20: note = chemically synthesized
  source 1..20: mol_type = other DNA
ggcagtaagtcttcagcatc

SEQ ID NO: 48951 - DNA, 20 bp, synthetic construct
  misc_feature 1..20: note = chemically synthesized
  source 1..20: mol_type = other DNA
gtcttcagcatcaggcattt

SEQ ID NO: 48952 - DNA, 20 bp, synthetic construct
  misc_feature 1..20: note = chemically synthesized
  source 1..20: mol_type = other DNA
tcttcagcatcaggcatttt

SEQ ID NO: 48953 - DNA, 20 bp, synthetic construct
  misc_feature 1..20: note = chemically synthesized
  source 1..20: mol_type = other DNA
cttcagcatcaggcattttg

SEQ ID NO: 48954 - DNA, 20 bp, synthetic construct
  misc_feature 1..20: note = chemically synthesized
  source 1..20: mol_type = other DNA
tcaggcattttggggtgact

SEQ ID NO: 48955 - DNA, 20 bp, synthetic construct
  misc_feature 1..20: note = chemically synthesized
  source 1..20: mol_type = other DNA
ttttggggtgactcagtaaa

SEQ ID NO: 48956 - DNA, 20 bp, synthetic construct
  misc_feature 1..20: note = chemically synthesized
  source 1..20: mol_type = other DNA
tggggtgactcagtaaatgg

SEQ ID NO: 48957 - DNA, 20 bp, synthetic construct
  misc_feature 1..20: note = chemically synthesized
  source 1..20: mol_type = other DNA
taaatggtagatcttgctac

SEQ ID NO: 48958 - DNA, 20 bp, synthetic construct
  misc_feature 1..20: note = chemically synthesized
  source 1..20: mol_type = other DNA
atggtagatcttgctaccag

SEQ ID NO: 48959 - DNA, 20 bp, synthetic construct
  misc_feature 1..20: note = chemically synthesized
  source 1..20: mol_type = other DNA
agatcttgctaccagtggaa

SEQ ID NO: 48960 - DNA, 20 bp, synthetic construct
  misc_feature 1..20: note = chemically synthesized
  source 1..20: mol_type = other DNA
ctaccagtggaacagccact

SEQ ID NO: 48961 - DNA, 20 bp, synthetic construct
  misc_feature 1..20: note = chemically synthesized
  source 1..20: mol_type = other DNA
taccagtggaacagccacta

SEQ ID NO: 48962 - DNA, 20 bp, synthetic construct
  misc_feature 1..20: note = chemically synthesized
  source 1..20: mol_type = other DNA
aacagccactaaggattctg

SEQ ID NO: 48963 - DNA, 20 bp, synthetic construct
  misc_feature 1..20: note = chemically synthesized
  source 1..20: mol_type = other DNA
gccactaaggattctgcagt

SEQ ID NO: 48964 - DNA, 20 bp, synthetic construct
  misc_feature 1..20: note = chemically synthesized
  source 1..20: mol_type = other DNA
cactaaggattctgcagtga

SEQ ID NO: 48965 - DNA, 20 bp, synthetic construct
  misc_feature 1..20: note = chemically synthesized
  source 1..20: mol_type = other DNA
taaggattctgcagtgagag

SEQ ID NO: 48966 - DNA, 20 bp, synthetic construct
  misc_feature 1..20: note = chemically synthesized
  source 1..20: mol_type = other DNA
aggattctgcagtgagagca

SEQ ID NO: 48967 - DNA, 20 bp, synthetic construct
  misc_feature 1..20: note = chemically synthesized
  source 1..20: mol_type = other DNA
ggattctgcagtgagagcag

SEQ ID NO: 48968 - DNA, 20 bp, synthetic construct
  misc_feature 1..20: note = chemically synthesized
  source 1..20: mol_type = other DNA
gattctgcagtgagagcaga

SEQ ID NO: 48969 - DNA, 20 bp, synthetic construct
  misc_feature 1..20: note = chemically synthesized
  source 1..20: mol_type = other DNA
ctgcagtgagagcagagggc

SEQ ID NO: 48970 - DNA, 20 bp, synthetic construct
  misc_feature 1..20: note = chemically synthesized
  source 1..20: mol_type = other DNA
gtgagagcagagggccagct

SEQ ID NO: 48971 - DNA, 20 bp, synthetic construct
  misc_feature 1..20: note = chemically synthesized
  source 1..20: mol_type = other DNA
agagcagagggccagctaag

SEQ ID NO: 48972 - DNA, 20 bp, synthetic construct
  misc_feature 1..20: note = chemically synthesized
  source 1..20: mol_type = other DNA
ccagctaagtggtactctcc

SEQ ID NO: 48973 - DNA, 20 bp, synthetic construct
  misc_feature 1..20: note = chemically synthesized
  source 1..20: mol_type = other DNA
agctaagtggtactctccca

SEQ ID NO: 48974 - DNA, 20 bp, synthetic construct
  misc_feature 1..20: note = chemically synthesized
  source 1..20: mol_type = other DNA
tcacgccaccccctccacct

SEQ ID NO: 48975 - DNA, 20 bp, synthetic construct
  misc_feature 1..20: note = chemically synthesized
  source 1..20: mol_type = other DNA
caccccctccaccttggaca

SEQ ID NO: 48976 - DNA, 20 bp, synthetic construct
  misc_feature 1..20: note = chemically synthesized
  source 1..20: mol_type = other DNA
accccctccaccttggacac

SEQ ID NO: 48977 - DNA, 20 bp, synthetic construct
  misc_feature 1..20: note = chemically synthesized
  source 1..20: mol_type = other DNA
accttggacacaggacgctg

SEQ ID NO: 48978 - DNA, 20 bp, synthetic construct
  misc_feature 1..20: note = chemically synthesized
  source 1..20: mol_type = other DNA
cacaggacgctgtggtttct

SEQ ID NO: 48979 - DNA, 20 bp, synthetic construct
  misc_feature 1..20: note = chemically synthesized
  source 1..20: mol_type = other DNA
ggacgctgtggtttctgagc

SEQ ID NO: 48980 - DNA, 20 bp, synthetic construct
  misc_feature 1..20: note = chemically synthesized
  source 1..20: mol_type = other DNA
gacgctgtggtttctgagcc

SEQ ID NO: 48981 - DNA, 20 bp, synthetic construct
  misc_feature 1..20: note = chemically synthesized
  source 1..20: mol_type = other DNA
ccaggtacaatgactccttt

SEQ ID NO: 48982 - DNA, 20 bp, synthetic construct
  misc_feature 1..20: note = chemically synthesized
  source 1..20: mol_type = other DNA
gtacaatgactcctttcggt

SEQ ID NO: 48983 - DNA, 20 bp, synthetic construct
  misc_feature 1..20: note = chemically synthesized
  source 1..20: mol_type = other DNA
atgactcctttcggtaagtg

SEQ ID NO: 48984 - DNA, 20 bp, synthetic construct
  misc_feature 1..20: note = chemically synthesized
  source 1..20: mol_type = other DNA
actcctttcggtaagtgcag

SEQ ID NO: 48985 - DNA, 20 bp, synthetic construct
  misc_feature 1..20: note = chemically synthesized
  source 1..20: mol_type = other DNA
cctttcggtaagtgcagtgg

SEQ ID NO: 48986 - DNA, 20 bp, synthetic construct
  misc_feature 1..20: note = chemically synthesized
  source 1..20: mol_type = other DNA
agtggaagctgtacactgcc

SEQ ID NO: 48987 - DNA, 20 bp, synthetic construct
  misc_feature 1..20: note = chemically synthesized
  source 1..20: mol_type = other DNA
gtggaagctgtacactgccc

SEQ ID NO: 48988 - DNA, 20 bp, synthetic construct
  misc_feature 1..20: note = chemically synthesized
  source 1..20: mol_type = other DNA
agctgtacactgcccaggca

SEQ ID NO: 48989 - DNA, 20 bp, synthetic construct
  misc_feature 1..20: note = chemically synthesized
  source 1..20: mol_type = other DNA
cactgcccaggcaaagcgtc

SEQ ID NO: 48990 - DNA, 20 bp, synthetic construct
  misc_feature 1..20: note = chemically synthesized
  source 1..20: mol_type = other DNA
actgcccaggcaaagcgtcc

SEQ ID NO: 48991 - DNA, 20 bp, synthetic construct
  misc_feature 1..20: note = chemically synthesized
  source 1..20: mol_type = other DNA
gcccaggcaaagcgtccggg

SEQ ID NO: 48992 - DNA, 20 bp, synthetic construct
  misc_feature 1..20: note = chemically synthesized
  source 1..20: mol_type = other DNA
ggcaaagcgtccgggcagcg

SEQ ID NO: 48993 - DNA, 20 bp, synthetic construct
  misc_feature 1..20: note = chemically synthesized
  source 1..20: mol_type = other DNA
gcaaagcgtccgggcagcgt

SEQ ID NO: 48994 - DNA, 20 bp, synthetic construct
  misc_feature 1..20: note = chemically synthesized
  source 1..20: mol_type = other DNA
aagcgtccgggcagcgtagg

SEQ ID NO: 48995 - DNA, 20 bp, synthetic construct
  misc_feature 1..20: note = chemically synthesized
  source 1..20: mol_type = other DNA
agcgtccgggcagcgtaggc

SEQ ID NO: 48996 - DNA, 20 bp, synthetic construct
  misc_feature 1..20: note = chemically synthesized
  source 1..20: mol_type = other DNA
ggcagcgtaggcgggcgact

SEQ ID NO: 48997 - DNA, 20 bp, synthetic construct
  misc_feature 1..20: note = chemically synthesized
  source 1..20: mol_type = other DNA
taggcgggcgactcagatcc

SEQ ID NO: 48998 - DNA, 20 bp, synthetic construct
  misc_feature 1..20: note = chemically synthesized
  source 1..20: mol_type = other DNA
cgggcgactcagatcccagc

SEQ ID NO: 48999 - DNA, 20 bp, synthetic construct
  misc_feature 1..20: note = chemically synthesized
  source 1..20: mol_type = other DNA
gcgactcagatcccagccag

SEQ ID NO: 49000 - DNA, 20 bp, synthetic construct
  misc_feature 1..20: note = chemically synthesized
  source 1..20: mol_type = other DNA
cagatcccagccagtggact

SEQ ID NO: 49001 - DNA, 20 bp, synthetic construct
  misc_feature 1..20: note = chemically synthesized
  source 1..20: mol_type = other DNA
ctgtttgctcctccgataac

SEQ ID NO: 49002 - DNA, 20 bp, synthetic construct
  misc_feature 1..20: note = chemically synthesized
  source 1..20: mol_type = other DNA
tgtttgctcctccgataact

SEQ ID NO: 49003 - DNA, 20 bp, synthetic construct
  misc_feature 1..20: note = chemically synthesized
  source 1..20: mol_type = other DNA
gtttgctcctccgataactg

SEQ ID NO: 49004 - DNA, 20 bp, synthetic construct
  misc_feature 1..20: note = chemically synthesized
  source 1..20: mol_type = other DNA
tccgataactggggtgacct

SEQ ID NO: 49005 - DNA, 20 bp, synthetic construct
  misc_feature 1..20: note = chemically synthesized
  source 1..20: mol_type = other DNA
tgaccttggttaatattcac

SEQ ID NO: 49006 - DNA, 20 bp, synthetic construct
  misc_feature 1..20: note = chemically synthesized
  source 1..20: mol_type = other DNA
ccttggttaatattcaccag

SEQ ID NO: 49007 - DNA, 20 bp, synthetic construct
  misc_feature 1..20: note = chemically synthesized
  source 1..20: mol_type = other DNA
agcctcccccgttgcccctc

SEQ ID NO: 49008 - DNA, 20 bp, synthetic construct
  misc_feature 1..20: note = chemically synthesized
  source 1..20: mol_type = other DNA
ctggatccactgcttaaata

SEQ ID NO: 49009 - DNA, 20 bp, synthetic construct
  misc_feature 1..20: note = chemically synthesized
  source 1..20: mol_type = other DNA
tccactgcttaaatacggac

SEQ ID NO: 49010 - DNA, 20 bp, synthetic construct
  misc_feature 1..20: note = chemically synthesized
  source 1..20: mol_type = other DNA
ccactgcttaaatacggacg

SEQ ID NO: 49011 - DNA, 20 bp, synthetic construct
  misc_feature 1..20: note = chemically synthesized
  source 1..20: mol_type = other DNA
tgcttaaatacggacgagga

SEQ ID NO: 49012 - DNA, 20 bp, synthetic construct
  misc_feature 1..20: note = chemically synthesized
  source 1..20: mol_type = other DNA
gcttaaatacggacgaggac

SEQ ID NO: 49013 - DNA, 20 bp, synthetic construct
  misc_feature 1..20: note = chemically synthesized
  source 1..20: mol_type = other DNA
cttaaatacggacgaggaca

SEQ ID NO: 49014 - DNA, 20 bp, synthetic construct
  misc_feature 1..20: note = chemically synthesized
  source 1..20: mol_type = other DNA
aggacagggccctgtctcct

SEQ ID NO: 49015 - DNA, 20 bp, synthetic construct
  misc_feature 1..20: note = chemically synthesized
  source 1..20: mol_type = other DNA
gggccctgtctcctcagctt

SEQ ID NO: 49016 - DNA, 20 bp, synthetic construct
  misc_feature 1..20: note = chemically synthesized
  source 1..20: mol_type = other DNA
ggccctgtctcctcagcttc

SEQ ID NO: 49017 - DNA, 20 bp, synthetic construct
  misc_feature 1..20: note = chemically synthesized
  source 1..20: mol_type = other DNA
ttcaggcaccaccactgacc

SEQ ID NO: 49018 - DNA, 20 bp, synthetic construct
  misc_feature 1..20: note = chemically synthesized
  source 1..20: mol_type = other DNA
tcaggcaccaccactgacct

SEQ ID NO: 49019 - DNA, 20 bp, synthetic construct
  misc_feature 1..20: note = chemically synthesized
  source 1..20: mol_type = other DNA
gcaccaccactgacctggga

SEQ ID NO: 49020 - DNA, 20 bp, synthetic construct
  misc_feature 1..20: note = chemically synthesized
  source 1..20: mol_type = other DNA
gacctgggacagtgaatcgt

SEQ ID NO: 49021 - DNA, 20 bp, synthetic construct
  misc_feature 1..20: note = chemically synthesized
  source 1..20: mol_type = other DNA
gtaagtatgcctttcactgc

SEQ ID NO: 49022 - DNA, 20 bp, synthetic construct
  misc_feature 1..20: note = chemically synthesized
  source 1..20: mol_type = other DNA
aagtatgcctttcactgcga

SEQ ID NO: 49023 - DNA, 20 bp, synthetic construct
  misc_feature 1..20: note = chemically synthesized
  source 1..20: mol_type = other DNA
agtatgcctttcactgcgag

SEQ ID NO: 49024 - DNA, 20 bp, synthetic construct
  misc_feature 1..20: note = chemically synthesized
  source 1..20: mol_type = other DNA
cctttcactgcgagaggttc

SEQ ID NO: 49025 - DNA, 20 bp, synthetic construct
  misc_feature 1..20: note = chemically synthesized
  source 1..20: mol_type = other DNA
tttcactgcgagaggttctg

SEQ ID NO: 49026 - DNA, 20 bp, synthetic construct
  misc_feature 1..20: note = chemically synthesized
  source 1..20: mol_type = other DNA
tcactgcgagaggttctgga

SEQ ID NO: 49027 - DNA, 20 bp, synthetic construct
  misc_feature 1..20: note = chemically synthesized
  source 1..20: mol_type = other DNA
cactgcgagaggttctggag

SEQ ID NO: 49028 - DNA, 20 bp, synthetic construct
  misc_feature 1..20: note = chemically synthesized
  source 1..20: mol_type = other DNA
gaggttctggagaggcttct

SEQ ID NO: 49029 - DNA, 20 bp, synthetic construct
  misc_feature 1..20: note = chemically synthesized
  source 1..20: mol_type = other DNA
agaggcttctgagctcccca

SEQ ID NO: 49030 - DNA, 20 bp, synthetic construct
  misc_feature 1..20: note = chemically synthesized
  source 1..20: mol_type = other DNA
cttctgagctccccatggcc

SEQ ID NO: 49031 - DNA, 20 bp, synthetic construct
  misc_feature 1..20: note = chemically synthesized
  source 1..20: mol_type = other DNA
ttctgagctccccatggccc

SEQ ID NO: 49032 - DNA, 20 bp, synthetic construct
  misc_feature 1..20: note = chemically synthesized
  source 1..20: mol_type = other DNA
tgagctccccatggcccagg

SEQ ID NO: 49033 - DNA, 20 bp, synthetic construct
  misc_feature 1..20: note = chemically synthesized
  source 1..20: mol_type = other DNA
gagctccccatggcccaggc

SEQ ID NO: 49034 - DNA, 20 bp, synthetic construct
  misc_feature 1..20: note = chemically synthesized
  source 1..20: mol_type = other DNA
ctccccatggcccaggcagg

SEQ ID NO: 49035 - DNA, 20 bp, synthetic construct
  misc_feature 1..20: note = chemically synthesized
  source 1..20: mol_type = other DNA
cccatggcccaggcaggcag

SEQ ID NO: 49036 - DNA, 20 bp, synthetic construct
  misc_feature 1..20: note = chemically synthesized
  source 1..20: mol_type = other DNA
ccatggcccaggcaggcagc

SEQ ID NO: 49037 - DNA, 20 bp, synthetic construct
  misc_feature 1..20: note = chemically synthesized
  source 1..20: mol_type = other DNA
gcccaggcaggcagcaggtc

SEQ ID NO: 49038 - DNA, 20 bp, synthetic construct
  misc_feature 1..20: note = chemically synthesized
  source 1..20: mol_type = other DNA
cccaggcaggcagcaggtct

SEQ ID NO: 49039 - DNA, 20 bp, synthetic construct
  misc_feature 1..20: note = chemically synthesized
  source 1..20: mol_type = other DNA
ccaggcaggcagcaggtctg

SEQ ID NO: 49040 - DNA, 20 bp, synthetic construct
  misc_feature 1..20: note = chemically synthesized
  source 1..20: mol_type = other DNA
ggcaggcagcaggtctgggg

SEQ ID NO: 49041 - DNA, 20 bp, synthetic construct
  misc_feature 1..20: note = chemically synthesized
  source 1..20: mol_type = other DNA
gcaggcagcaggtctggggc

SEQ ID NO: 49042 - DNA, 20 bp, synthetic construct
  misc_feature 1..20: note = chemically synthesized
  source 1..20: mol_type = other DNA
aggcagcaggtctggggcag

SEQ ID NO: 49043 - DNA, 20 bp, synthetic construct
  misc_feature 1..20: note = chemically synthesized
  source 1..20: mol_type = other DNA
ggcagcaggtctggggcagg

SEQ ID NO: 49044 - DNA, 20 bp, synthetic construct
  misc_feature 1..20: note = chemically synthesized
  source 1..20: mol_type = other DNA
gcagcaggtctggggcagga

SEQ ID NO: 49045 - DNA, 20 bp, synthetic construct
  misc_feature 1..20: note = chemically synthesized
  source 1..20: mol_type = other DNA
cagcaggtctggggcaggag

SEQ ID NO: 49046 - DNA, 20 bp, synthetic construct
  misc_feature 1..20: note = chemically synthesized
  source 1..20: mol_type = other DNA
agcaggtctggggcaggagg

SEQ ID NO: 49047 - DNA, 20 bp, synthetic construct
  misc_feature 1..20: note = chemically synthesized
  source 1..20: mol_type = other DNA
gcaggtctggggcaggaggg

SEQ ID NO: 49048 - DNA, 20 bp, synthetic construct
  misc_feature 1..20: note = chemically synthesized
  source 1..20: mol_type = other DNA
ctggggcaggaggggggttg

SEQ ID NO: 49049 - DNA, 20 bp, synthetic construct
  misc_feature 1..20: note = chemically synthesized
  source 1..20: mol_type = other DNA
ggggcaggaggggggttgtg

SEQ ID NO: 49050 - DNA, 20 bp, synthetic construct
  misc_feature 1..20: note = chemically synthesized
  source 1..20: mol_type = other DNA
gcaggaggggggttgtggag

SEQ ID NO: 49051 - DNA, 20 bp, synthetic construct
  misc_feature 1..20: note = chemically synthesized
  source 1..20: mol_type = other DNA
caggaggggggttgtggagt

SEQ ID NO: 49052 - DNA, 20 bp, synthetic construct
  misc_feature 1..20: note = chemically synthesized
  source 1..20: mol_type = other DNA
ggagtgggtatccgcctgct

SEQ ID NO: 49053 - DNA, 20 bp, synthetic construct
  misc_feature 1..20: note = chemically synthesized
  source 1..20: mol_type = other DNA
gagtgggtatccgcctgctg

SEQ ID NO: 49054 - DNA, 20 bp, synthetic construct
  misc_feature 1..20: note = chemically synthesized
  source 1..20: mol_type = other DNA
ggtatccgcctgctgaggtg

SEQ ID NO: 49055 - DNA, 20 bp, synthetic construct
  misc_feature 1..20: note = chemically synthesized
  source 1..20: mol_type = other DNA
gtatccgcctgctgaggtgc

SEQ ID NO: 49056 - DNA, 20 bp, synthetic construct
  misc_feature 1..20: note = chemically synthesized
  source 1..20: mol_type = other DNA
tatccgcctgctgaggtgca

SEQ ID NO: 49057 - DNA, 20 bp, synthetic construct
  misc_feature 1..20: note = chemically synthesized
  source 1..20: mol_type = other DNA
ccgcctgctgaggtgcaggg

SEQ ID NO: 49058 - DNA, 20 bp, synthetic construct
  misc_feature 1..20: note = chemically synthesized
  source 1..20: mol_type = other DNA
ctgctgaggtgcagggcaga

SEQ ID NO: 49059 - DNA, 20 bp, synthetic construct
  misc_feature 1..20: note = chemically synthesized
  source 1..20: mol_type = other DNA
gctgaggtgcagggcagatg

SEQ ID NO: 49060 - DNA, 20 bp, synthetic construct
  misc_feature 1..20: note = chemically synthesized
  source 1..20: mol_type = other DNA
tgaggtgcagggcagatgga

SEQ ID NO: 49061 - DNA, 20 bp, synthetic construct
  misc_feature 1..20: note = chemically synthesized
  source 1..20: mol_type = other DNA
gaggtgcagggcagatggag

SEQ ID NO: 49062 - DNA, 20 bp, synthetic construct
  misc_feature 1..20: note = chemically synthesized
  source 1..20: mol_type = other DNA
cagggcagatggagaggctg

SEQ ID NO: 49063 - DNA, 20 bp, synthetic construct
  misc_feature 1..20: note = chemically synthesized
  source 1..20: mol_type = other DNA
cagatggagaggctgcagct

SEQ ID NO: 49064 - DNA, 20 bp, synthetic construct
  misc_feature 1..20: note = chemically synthesized
  source 1..20: mol_type = other DNA
agctcctattttcataataa

SEQ ID NO: 49065 - DNA, 20 bp, synthetic construct
  misc_feature 1..20: note = chemically synthesized
  source 1..20: mol_type = other DNA
tcctattttcataataacag

SEQ ID NO: 49066 - DNA, 20 bp, synthetic construct
  misc_feature 1..20: note = chemically synthesized
  source 1..20: mol_type = other DNA
ttcataataacagcagccat

SEQ ID NO: 49067 - DNA, 20 bp, synthetic construct
  misc_feature 1..20: note = chemically synthesized
  source 1..20: mol_type = other DNA
tcataataacagcagccatg

SEQ ID NO: 49068 - DNA, 20 bp, synthetic construct
  misc_feature 1..20: note = chemically synthesized
  source 1..20: mol_type = other DNA
cataataacagcagccatga

SEQ ID NO: 49069 - DNA, 20 bp, synthetic construct
  misc_feature 1..20: note = chemically synthesized
  source 1..20: mol_type = other DNA
gagggttgtgtcctgtttcc

SEQ ID NO: 49070 - DNA, 20 bp, synthetic construct
  misc_feature 1..20: note = chemically synthesized
  source 1..20: mol_type = other DNA
tcctgtttcccagtcctgcc

SEQ ID NO: 49071 - DNA, 20 bp, synthetic construct
  misc_feature 1..20: note = chemically synthesized
  source 1..20: mol_type = other DNA
agtcctgcccggtcccccct

SEQ ID NO: 49072 - DNA, 20 bp, synthetic construct
  misc_feature 1..20: note = chemically synthesized
  source 1..20: mol_type = other DNA
ggtcccccctcggtacctcc

SEQ ID NO: 49073 - DNA, 20 bp, synthetic construct
  misc_feature 1..20: note = chemically synthesized
  source 1..20: mol_type = other DNA
cccccctcggtacctcctgg

SEQ ID NO: 49074 - DNA, 20 bp, synthetic construct
  misc_feature 1..20: note = chemically synthesized
  source 1..20: mol_type = other DNA
gtacctcctggtggatacac

SEQ ID NO: 49075 - DNA, 20 bp, synthetic construct
  misc_feature 1..20: note = chemically synthesized
  source 1..20: mol_type = other DNA
gtggatacactggttcctgt

SEQ ID NO: 49076 - DNA, 20 bp, synthetic construct
  misc_feature 1..20: note = chemically synthesized
  source 1..20: mol_type = other DNA
gatacactggttcctgtaag

SEQ ID NO: 49077 - DNA, 20 bp, synthetic construct
  misc_feature 1..20: note = chemically synthesized
  source 1..20: mol_type = other DNA
acactggttcctgtaagcag

SEQ ID NO: 49078 - DNA, 20 bp, synthetic construct
  misc_feature 1..20: note = chemically synthesized
  source 1..20: mol_type = other DNA
ctggttcctgtaagcagaag

SEQ ID NO: 49079 - DNA, 20 bp, synthetic construct
  misc_feature 1..20: note = chemically synthesized
  source 1..20: mol_type = other DNA
tcctgtaagcagaagtggat

SEQ ID NO: 49080 - DNA, 20 bp, synthetic construct
  misc_feature 1..20: note = chemically synthesized
  source 1..20: mol_type = other DNA
cctgtaagcagaagtggatg

SEQ ID NO: 49081 - DNA, 20 bp, synthetic construct
  misc_feature 1..20: note = chemically synthesized
  source 1..20: mol_type = other DNA
ctgtaagcagaagtggatga

SEQ ID NO: 49082 - DNA, 20 bp, synthetic construct
  misc_feature 1..20: note = chemically synthesized
  source 1..20: mol_type = other DNA
cagaagtggatgagggtgtc

SEQ ID NO: 49083 - DNA, 20 bp, synthetic construct
  misc_feature 1..20: note = chemically synthesized
  source 1..20: mol_type = other DNA
agaagtggatgagggtgtct

SEQ ID NO: 49084 - DNA, 20 bp, synthetic construct
  misc_feature 1..20: note = chemically synthesized
  source 1..20: mol_type = other DNA
gatgagggtgtctaggtctg

SEQ ID NO: 49085 - DNA, 20 bp, synthetic construct
  misc_feature 1..20: note = chemically synthesized
  source 1..20: mol_type = other DNA
ggtgtctaggtctgcagtcc

SEQ ID NO: 49086 - DNA, 20 bp, synthetic construct
  misc_feature 1..20: note = chemically synthesized
  source 1..20: mol_type = other DNA
ggtctgcagtcctggcaccc

SEQ ID NO: 49087 - DNA, 20 bp, synthetic construct
  misc_feature 1..20: note = chemically synthesized
  source 1..20: mol_type = other DNA
gtctgcagtcctggcacccc

SEQ ID NO: 49088 - DNA, 20 bp, synthetic construct
  misc_feature 1..20: note = chemically synthesized
  source 1..20: mol_type = other DNA
gcagtcctggcaccccagga

SEQ ID NO: 49089 - DNA, 20 bp, synthetic construct
  misc_feature 1..20: note = chemically synthesized
  source 1..20: mol_type = other DNA
cagtcctggcaccccaggat

SEQ ID NO: 49090 - DNA, 20 bp, synthetic construct
  misc_feature 1..20: note = chemically synthesized
  source 1..20: mol_type = other DNA
agtcctggcaccccaggatg

SEQ ID NO: 49091 - DNA, 20 bp, synthetic construct
  misc_feature 1..20: note = chemically synthesized
  source 1..20: mol_type = other DNA
gtcctggcaccccaggatgg

SEQ ID NO: 49092 - DNA, 20 bp, synthetic construct
  misc_feature 1..20: note = chemically synthesized
  source 1..20: mol_type = other DNA
caccccaggatgggggacac

SEQ ID NO: 49093 - DNA, 20 bp, synthetic construct
  misc_feature 1..20: note = chemically synthesized
  source 1..20: mol_type = other DNA
caggatgggggacaccagcc

SEQ ID NO: 49094 - DNA, 20 bp, synthetic construct
  misc_feature 1..20: note = chemically synthesized
  source 1..20: mol_type = other DNA
gggggacaccagccaagata

SEQ ID NO: 49095 - DNA, 20 bp, synthetic construct
  misc_feature 1..20: note = chemically synthesized
  source 1..20: mol_type = other DNA
caccagccaagatacagcaa

SEQ ID NO: 49096 - DNA, 20 bp, synthetic construct
  misc_feature 1..20: note = chemically synthesized
  source 1..20: mol_type = other DNA
aagatacagcaacagcaaca

SEQ ID NO: 49097 - DNA, 20 bp, synthetic construct
  misc_feature 1..20: note = chemically synthesized
  source 1..20: mol_type = other DNA
acagcaacagcaacaaagcg

SEQ ID NO: 49098 - DNA, 20 bp, synthetic construct
  misc_feature 1..20: note = chemically synthesized
  source 1..20: mol_type = other DNA
gccatttctttctgtttgca

SEQ ID NO: 49099 - DNA, 20 bp, synthetic construct
  misc_feature 1..20: note = chemically synthesized
  source 1..20: mol_type = other DNA
tgcacagctcctctgtctgt

SEQ ID NO: 49100 - DNA, 20 bp, synthetic construct
  misc_feature 1..20: note = chemically synthesized
  source 1..20: mol_type = other DNA
gcacagctcctctgtctgtc

SEQ ID NO: 49101 - DNA, 20 bp, synthetic construct
  misc_feature 1..20: note = chemically synthesized
  source 1..20: mol_type = other DNA
cacagctcctctgtctgtcg

SEQ ID NO: 49102 - DNA, 20 bp, synthetic construct
  misc_feature 1..20: note = chemically synthesized
  source 1..20: mol_type = other DNA
acagctcctctgtctgtcgg

SEQ ID NO: 49103 - DNA, 20 bp, synthetic construct
  misc_feature 1..20: note = chemically synthesized
  source 1..20: mol_type = other DNA
tcctgtctgttgtctcctat

SEQ ID NO: 49104 - DNA, 20 bp, synthetic construct
  misc_feature 1..20: note = chemically synthesized
  source 1..20: mol_type = other DNA
tcaccacctctcctactgct

SEQ ID NO: 49105 - DNA, 20 bp, synthetic construct
  misc_feature 1..20: note = chemically synthesized
  source 1..20: mol_type = other DNA
caccacctctcctactgctt

SEQ ID NO: 49106 - DNA, 20 bp, synthetic construct
  misc_feature 1..20: note = chemically synthesized
  source 1..20: mol_type = other DNA
tgcatctttctccccttcta

SEQ ID NO: 49107 - DNA, 20 bp, synthetic construct
  misc_feature 1..20: note = chemically synthesized
  source 1..20: mol_type = other DNA
ctttctccccttctatagat

SEQ ID NO: 49108 - DNA, 20 bp, synthetic construct
  misc_feature 1..20: note = chemically synthesized
  source 1..20: mol_type = other DNA
tttctccccttctatagatg

SEQ ID NO: 49109 - DNA, 20 bp, synthetic construct
  misc_feature 1..20: note = chemically synthesized
  source 1..20: mol_type = other DNA
tctccccttctatagatgag

SEQ ID NO: 49110 - DNA, 20 bp, synthetic construct
  misc_feature 1..20: note = chemically synthesized
  source 1..20: mol_type = other DNA
ctccccttctatagatgagg

SEQ ID NO: 49111 - DNA, 20 bp, synthetic construct
  misc_feature 1..20: note = chemically synthesized
  source 1..20: mol_type = other DNA
cttctatagatgaggaggtt

SEQ ID NO: 49112 - DNA, 20 bp, synthetic construct
  misc_feature 1..20: note = chemically synthesized
  source 1..20: mol_type = other DNA
ttctatagatgaggaggtta

SEQ ID NO: 49113 - DNA, 20 bp, synthetic construct
  misc_feature 1..20: note = chemically synthesized
  source 1..20: mol_type = other DNA
tagatgaggaggttaaggtc

SEQ ID NO: 49114 - DNA, 20 bp, synthetic construct
  misc_feature 1..20: note = chemically synthesized
  source 1..20: mol_type = other DNA
gatgaggaggttaaggtcca

SEQ ID NO: 49115 - DNA, 20 bp, synthetic construct
  misc_feature 1..20: note = chemically synthesized
  source 1..20: mol_type = other DNA
tgaggaggttaaggtccaga

SEQ ID NO: 49116 - DNA, 20 bp, synthetic construct
  misc_feature 1..20: note = chemically synthesized
  source 1..20: mol_type = other DNA
gaggaggttaaggtccagag

SEQ ID NO: 49117 - DNA, 20 bp, synthetic construct
  misc_feature 1..20: note = chemically synthesized
  source 1..20: mol_type = other DNA
aggaggttaaggtccagaga

SEQ ID NO: 49118 - DNA, 20 bp, synthetic construct
  misc_feature 1..20: note = chemically synthesized
  source 1..20: mol_type = other DNA
ggaggttaaggtccagagag

SEQ ID NO: 49119 - DNA, 20 bp, synthetic construct
  misc_feature 1..20: note = chemically synthesized
  source 1..20: mol_type = other DNA
ggttaaggtccagagagggg

SEQ ID NO: 49120 - DNA, 20 bp, synthetic construct
  misc_feature 1..20: note = chemically synthesized
  source 1..20: mol_type = other DNA
gttaaggtccagagaggggt

SEQ ID NO: 49121 - DNA, 20 bp, synthetic construct
  misc_feature 1..20: note = chemically synthesized
  source 1..20: mol_type = other DNA
ttaaggtccagagaggggtg

SEQ ID NO: 49122 - DNA, 20 bp, synthetic construct
  misc_feature 1..20: note = chemically synthesized
  source 1..20: mol_type = other DNA
aaggtccagagaggggtggg

SEQ ID NO: 49123 - DNA, 20 bp, synthetic construct
  misc_feature 1..20: note = chemically synthesized
  source 1..20: mol_type = other DNA
aggtccagagaggggtgggg

SEQ ID NO: 49124 - DNA, 20 bp, synthetic construct
  misc_feature 1..20: note = chemically synthesized
  source 1..20: mol_type = other DNA
agaggggtggggaggaacgc

SEQ ID NO: 49125 - DNA, 20 bp, synthetic construct
  misc_feature 1..20: note = chemically synthesized
  source 1..20: mol_type = other DNA
ctcacattctccatcccctc

SEQ ID NO: 49126 - DNA, 20 bp, synthetic construct
  misc_feature 1..20: note = chemically synthesized
  source 1..20: mol_type = other DNA
ccatcccctccagatatgac

SEQ ID NO: 49127 - DNA, 20 bp, synthetic construct
  misc_feature 1..20: note = chemically synthesized
  source 1..20: mol_type = other DNA
catcccctccagatatgacc

SEQ ID NO: 49128 - DNA, 20 bp, synthetic construct
  misc_feature 1..20: note = chemically synthesized
  source 1..20: mol_type = other DNA
cctccagatatgaccaggaa

SEQ ID NO: 49129 - DNA, 20 bp, synthetic construct
  misc_feature 1..20: note = chemically synthesized
  source 1..20: mol_type = other DNA
gaccaggaacagacctgtgc

SEQ ID NO: 49130 - DNA, 20 bp, synthetic construct
  misc_feature 1..20: note = chemically synthesized
  source 1..20: mol_type = other DNA
accaggaacagacctgtgcc

SEQ ID NO: 49131 - DNA, 20 bp, synthetic construct
  misc_feature 1..20: note = chemically synthesized
  source 1..20: mol_type = other DNA
aacagacctgtgccaggcct

SEQ ID NO: 49132 - DNA, 20 bp, synthetic construct
  misc_feature 1..20: note = chemically synthesized
  source 1..20: mol_type = other DNA
tgttcctggtcatatctgga

SEQ ID NO: 49133 - DNA, 20 bp, synthetic construct
  misc_feature 1..20: note = chemically synthesized
  source 1..20: mol_type = other DNA
ggtcatatctggaggggatg

SEQ ID NO: 49134 - DNA, 20 bp, synthetic construct
  misc_feature 1..20: note = chemically synthesized
  source 1..20: mol_type = other DNA
ttggctggtgtcccccatcc

SEQ ID NO: 49135 - DNA, 20 bp, synthetic construct
  misc_feature 1..20: note = chemically synthesized
  source 1..20: mol_type = other DNA
tctgccctgcacctcagcag

SEQ ID NO: 49136 - DNA, 20 bp, synthetic construct
  misc_feature 1..20: note = chemically synthesized
  source 1..20: mol_type = other DNA
tcctcgtccgtatttaagca

SEQ ID NO: 49137 - DNA, 20 bp, synthetic construct
  misc_feature 1..20: note = chemically synthesized
  source 1..20: mol_type = other DNA
ggcaacgggggaggctgctg

SEQ ID NO: 49138 - DNA, 20 bp, synthetic construct
  misc_feature 1..20: note = chemically synthesized
  source 1..20: mol_type = other DNA
caggggctaagtccactggc

SEQ ID NO: 49139 - DNA, 20 bp, synthetic construct
  misc_feature 1..20: note = chemically synthesized
  source 1..20: mol_type = other DNA
ctaagtccactggctgggat

SEQ ID NO: 49140 - DNA, 20 bp, synthetic construct
  misc_feature 1..20: note = chemically synthesized
  source 1..20: mol_type = other DNA
cttccactgcacttaccgaa

SEQ ID NO: 49141 - DNA, 20 bp, synthetic construct
  misc_feature 1..20: note = chemically synthesized
  source 1..20: mol_type = other DNA
cgtcctgtgtccaaggtgga

SEQ ID NO: 49142 - DNA, 20 bp, synthetic construct
  misc_feature 1..20: note = chemically synthesized
  source 1..20: mol_type = other DNA
tccaaggtggagggggtggc

SEQ ID NO: 49143 - DNA, 20 bp, synthetic construct
  misc_feature 1..20: note = chemically synthesized
  source 1..20: mol_type = other DNA
gtgagtcagacagtctctgg

SEQ ID NO: 49144 - DNA, 20 bp, synthetic construct
  misc_feature 1..20: note = chemically synthesized
  source 1..20: mol_type = other DNA
ctggccctctgctctcactg

SEQ ID NO: 49145 - DNA, 20 bp, synthetic construct
  misc_feature 1..20: note = chemically synthesized
  source 1..20: mol_type = other DNA
gtagcaagatctaccattta

SEQ ID NO: 49146 - DNA, 20 bp, synthetic construct
  misc_feature 1..20: note = chemically synthesized
  source 1..20: mol_type = other DNA
ttactgccgccctgggagat

SEQ ID NO: 49147 - DNA, 20 bp, synthetic construct
  misc_feature 1..20: note = chemically synthesized
  source 1..20: mol_type = other DNA
tgccgccctgggagatcaga

SEQ ID NO: 49148 - DNA, 20 bp, synthetic construct
  misc_feature 1..20: note = chemically synthesized
  source 1..20: mol_type = other DNA
tggcatggggggccgtgaga

SEQ ID NO: 49149 - DNA, 20 bp, synthetic construct
  misc_feature 1..20: note = chemically synthesized
  source 1..20: mol_type = other DNA
actgtttcacctgcatccca

SEQ ID NO: 49150 - DNA, 20 bp, synthetic construct
  misc_feature 1..20: note = chemically synthesized
  source 1..20: mol_type = other DNA
aagcatgcttgtgaagtgcc

SEQ ID NO: 49151 - DNA, 20 bp, synthetic construct
  misc_feature 1..20: note = chemically synthesized
  source 1..20: mol_type = other DNA
gcacacagtaggctctttat

SEQ ID NO: 49152 - DNA, 20 bp, synthetic construct
  misc_feature 1..20: note = chemically synthesized
  source 1..20: mol_type = other DNA
agtgtgatccgtatacagct

SEQ ID NO: 49153 - DNA, 20 bp, synthetic construct
  misc_feature 1..20: note = chemically synthesized
  source 1..20: mol_type = other DNA
gtatacagcttggagtttct

SEQ ID NO: 49154 - DNA, 20 bp, synthetic construct
  misc_feature 1..20: note = chemically synthesized
  source 1..20: mol_type = other DNA
tggatacatggcccccactc

SEQ ID NO: 49155 - DNA, 20 bp, synthetic construct
  misc_feature 1..20: note = chemically synthesized
  source 1..20: mol_type = other DNA
ggaggcctttggagactgct

SEQ ID NO: 49156 - DNA, 20 bp, synthetic construct
  misc_feature 1..20: note = chemically synthesized
  source 1..20: mol_type = other DNA
ggtggaggggaggggaggta

SEQ ID NO: 49157 - DNA, 20 bp, synthetic construct
  misc_feature 1..20: note = chemically synthesized
  source 1..20: mol_type = other DNA
gtacgtgccgtagatacttg

SEQ ID NO: 49158 - DNA, 20 bp, synthetic construct
  misc_feature 1..20: note = chemically synthesized
  source 1..20: mol_type = other DNA
gtgccgtagatacttgcaga

SEQ ID NO: 49159 - DNA, 20 bp, synthetic construct
  misc_feature 1..20: note = chemically synthesized
  source 1..20: mol_type = other DNA
cgtagatacttgcagagtga

SEQ ID NO: 49160 - DNA, 20 bp, synthetic construct
  misc_feature 1..20: note = chemically synthesized
  source 1..20: mol_type = other DNA
gatacttgcagagtgaatgg

SEQ ID NO: 49161 - DNA, 20 bp, synthetic construct
  misc_feature 1..20: note = chemically synthesized
  source 1..20: mol_type = other DNA
ccaccttggggctctaccag

SEQ ID NO: 49162 - DNA, 20 bp, synthetic construct
  misc_feature 1..20: note = chemically synthesized
  source 1..20: mol_type = other DNA
tctaccaggcgagtgaccca

SEQ ID NO: 49163 - DNA, 20 bp, synthetic construct
  misc_feature 1..20: note = chemically synthesized
  source 1..20: mol_type = other DNA
tactggctgtgaggcctcag

SEQ ID NO: 49164 - DNA, 20 bp, synthetic construct
  misc_feature 1..20: note = chemically synthesized
  source 1..20: mol_type = other DNA
aatttccctatctgtaaaat

SEQ ID NO: 49165 - DNA, 20 bp, synthetic construct
  misc_feature 1..20: note = chemically synthesized
  source 1..20: mol_type = other DNA
gtaccttgttgagctgctgt

SEQ ID NO: 49166 - DNA, 20 bp, synthetic construct
  misc_feature 1..20: note = chemically synthesized
  source 1..20: mol_type = other DNA
agttcaaggaaagctcagag

SEQ ID NO: 49167 - DNA, 20 bp, synthetic construct
  misc_feature 1..20: note = chemically synthesized
  source 1..20: mol_type = other DNA
ggaaagctcagagacgggta

SEQ ID NO: 49168 - DNA, 20 bp, synthetic construct
  misc_feature 1..20: note = chemically synthesized
  source 1..20: mol_type = other DNA
gtgtcaggggctggtgtcac

SEQ ID NO: 49169 - DNA, 20 bp, synthetic construct
  misc_feature 1..20: note = chemically synthesized
  source 1..20: mol_type = other DNA
aggggctggtgtcactgggg

SEQ ID NO: 49170 - DNA, 20 bp, synthetic construct
  misc_feature 1..20: note = chemically synthesized
  source 1..20: mol_type = other DNA
tcattcagttaccctgtgaa

SEQ ID NO: 49171 - DNA, 20 bp, synthetic construct
  misc_feature 1..20: note = chemically synthesized
  source 1..20: mol_type = other DNA
ctgtccttcccctgagctgg

SEQ ID NO: 49172 - DNA, 20 bp, synthetic construct
  misc_feature 1..20: note = chemically synthesized
  source 1..20: mol_type = other DNA
ccttcccctgagctggctga

SEQ ID NO: 49173 - DNA, 20 bp, synthetic construct
  misc_feature 1..20: note = chemically synthesized
  source 1..20: mol_type = other DNA
tgtccctcccacctgtggaa

SEQ ID NO: 49174 - DNA, 20 bp, synthetic construct
  misc_feature 1..20: note = chemically synthesized
  source 1..20: mol_type = other DNA
gtctcttctggcaggcacag

SEQ ID NO: 49175 - DNA, 20 bp, synthetic construct
  misc_feature 1..20: note = chemically synthesized
  source 1..20: mol_type = other DNA
aggttgccgcccctccaacc

SEQ ID NO: 49176 - DNA, 20 bp, synthetic construct
  misc_feature 1..20: note = chemically synthesized
  source 1..20: mol_type = other DNA
ttggttcagctcaggactct

SEQ ID NO: 49177 - DNA, 20 bp, synthetic construct
  misc_feature 1..20: note = chemically synthesized
  source 1..20: mol_type = other DNA
gcccacccaggaagtagact

SEQ ID NO: 49178 - DNA, 20 bp, synthetic construct
  misc_feature 1..20: note = chemically synthesized
  source 1..20: mol_type = other DNA
ggacaagtcaccctctccct

SEQ ID NO: 49179 - DNA, 20 bp, synthetic construct
  misc_feature 1..20: note = chemically synthesized
  source 1..20: mol_type = other DNA
aggtacagtcacactgccca

SEQ ID NO: 49180 - DNA, 20 bp, synthetic construct
  misc_feature 1..20: note = chemically synthesized
  source 1..20: mol_type = other DNA
cttgcggcaactcaaaggga

SEQ ID NO: 49181 - DNA, 20 bp, synthetic construct
  misc_feature 1..20: note = chemically synthesized
  source 1..20: mol_type = other DNA
aagggagagggtgacttgtc

SEQ ID NO: 49182 - DNA, 20 bp, synthetic construct
  misc_feature 1..20: note = chemically synthesized
  source 1..20: mol_type = other DNA
caggtgacatgccgggctgt

SEQ ID NO: 49183 - DNA, 20 bp, synthetic construct
  misc_feature 1..20: note = chemically synthesized
  source 1..20: mol_type = other DNA
ctccacccgaagtctacttc

SEQ ID NO: 49184 - DNA, 20 bp, synthetic construct
  misc_feature 1..20: note = chemically synthesized
  source 1..20: mol_type = other DNA
tgcctccacgcagcaaccct

SEQ ID NO: 49185 - DNA, 20 bp, synthetic construct
  misc_feature 1..20: note = chemically synthesized
  source 1..20: mol_type = other DNA
agctgaaccaagaaggagga

SEQ ID NO: 49186 - DNA, 20 bp, synthetic construct
  misc_feature 1..20: note = chemically synthesized
  source 1..20: mol_type = other DNA
gcctagccgctgctgctgcc

SEQ ID NO: 49187 - DNA, 20 bp, synthetic construct
  misc_feature 1..20: note = chemically synthesized
  source 1..20: mol_type = other DNA
gtgggagggacagcagggct

SEQ ID NO: 49188 - DNA, 20 bp, synthetic construct
  misc_feature 1..20: note = chemically synthesized
  source 1..20: mol_type = other DNA
gggacagcagggcttagagt

SEQ ID NO: 49189 - DNA, 20 bp, synthetic construct
  misc_feature 1..20: note = chemically synthesized
  source 1..20: mol_type = other DNA
cacagcccagtgctggagct

SEQ ID NO: 49190 - DNA, 20 bp, synthetic construct
  misc_feature 1..20: note = chemically synthesized
  source 1..20: mol_type = other DNA
gcccagtgctggagctgtga

SEQ ID NO: 49191 - DNA, 20 bp, synthetic construct
  misc_feature 1..20: note = chemically synthesized
  source 1..20: mol_type = other DNA
tgtgagtggatgtagagcag

SEQ ID NO: 49192 - DNA, 20 bp, synthetic construct
  misc_feature 1..20: note = chemically synthesized
  source 1..20: mol_type = other DNA
ggacaggggccctgaagcca

SEQ ID NO: 49193 - DNA, 20 bp, synthetic construct
  misc_feature 1..20: note = chemically synthesized
  source 1..20: mol_type = other DNA
gagctcagagagaaggggag

SEQ ID NO: 49194 - DNA, 20 bp, synthetic construct
  misc_feature 1..20: note = chemically synthesized
  source 1..20: mol_type = other DNA
agtttcccgctgcctgaaag

SEQ ID NO: 49195 - DNA, 20 bp, synthetic construct
  misc_feature 1..20: note = chemically synthesized
  source 1..20: mol_type = other DNA
ggtggtacctactcccttca

SEQ ID NO: 49196 - DNA, 20 bp, synthetic construct
  misc_feature 1..20: note = chemically synthesized
  source 1..20: mol_type = other DNA
ctactcccttcacagggtaa

SEQ ID NO: 49197 - DNA, 20 bp, synthetic construct
  misc_feature 1..20: note = chemically synthesized
  source 1..20: mol_type = other DNA
tgaggcctcacagccagtaa

SEQ ID NO: 49198 - DNA, 20 bp, synthetic construct
  misc_feature 1..20: note = chemically synthesized
  source 1..20: mol_type = other DNA
cagtaagtgggttccctggt

SEQ ID NO: 49199 - DNA, 20 bp, synthetic construct
  misc_feature 1..20: note = chemically synthesized
  source 1..20: mol_type = other DNA
tggtctgaatgtgtgtgctg

SEQ ID NO: 49200 - DNA, 20 bp, synthetic construct
  misc_feature 1..20: note = chemically synthesized
  source 1..20: mol_type = other DNA
tgtgtgtgctggaggatcct

SEQ ID NO: 49201 - DNA, 20 bp, synthetic construct
  misc_feature 1..20: note = chemically synthesized
  source 1..20: mol_type = other DNA
tggaggcataaatgggactg

SEQ ID NO: 49202 - DNA, 20 bp, synthetic construct
  misc_feature 1..20: note = chemically synthesized
  source 1..20: mol_type = other DNA
gccagctcccaagcaggttt

SEQ ID NO: 49203 - DNA, 20 bp, synthetic construct
  misc_feature 1..20: note = chemically synthesized
  source 1..20: mol_type = other DNA
aatctgatttaggcttttaa

SEQ ID NO: 49204 - DNA, 20 bp, synthetic construct
  misc_feature 1..20: note = chemically synthesized
  source 1..20: mol_type = other DNA
ccaaaggcctccaacaaccc

SEQ ID NO: 49205 - DNA, 20 bp, synthetic construct
  misc_feature 1..20: note = chemically synthesized
  source 1..20: mol_type = other DNA
aaagaaactccaagctgtat

SEQ ID NO: 49206 - DNA, 20 bp, synthetic construct
  misc_feature 1..20: note = chemically synthesized
  source 1..20: mol_type = other DNA
ggcacttcacaagcatgctt

SEQ ID NO: 49207 - DNA, 20 bp, synthetic construct
  misc_feature 1..20: note = chemically synthesized
  source 1..20: mol_type = other DNA
gaatgaaacttccaactctt

SEQ ID NO: 49208 - DNA, 20 bp, synthetic construct
  misc_feature 1..20: note = chemically synthesized
  source 1..20: mol_type = other DNA
ttttccatcgggaccatcaa

SEQ ID NO: 49209 - DNA, 20 bp, synthetic construct
  misc_feature 1..20: note = chemically synthesized
  source 1..20: mol_type = other DNA
gtgtttgtgtctaaggctga

SEQ ID NO: 49210 - DNA, 20 bp, synthetic construct
  misc_feature 1..20: note = chemically synthesized
  source 1..20: mol_type = other DNA
ctaaggctgactgggtaact

SEQ ID NO: 49211 - DNA, 20 bp, synthetic construct
  misc_feature 1..20: note = chemically synthesized
  source 1..20: mol_type = other DNA
gtcttcagcatcaggcattt

SEQ ID NO: 49212 - DNA, 20 bp, synthetic construct
  misc_feature 1..20: note = chemically synthesized
  source 1..20: mol_type = other DNA
ctaccagtggaacagccact

SEQ ID NO: 49213 - DNA, 20 bp, synthetic construct
  misc_feature 1..20: note = chemically synthesized
  source 1..20: mol_type = other DNA
ctgtttgctcctccgataac

SEQ ID NO: 49214 - DNA, 20 bp, synthetic construct
  misc_feature 1..20: note = chemically synthesized
  source 1..20: mol_type = other DNA
cagcctcccccgttgcccct

SEQ ID NO: 49215 - DNA, 20 bp, synthetic construct
  misc_feature 1..20: note = chemically synthesized
  source 1..20: mol_type = other DNA
accaccactgacctgggaca

SEQ ID NO: 49216 - DNA, 20 bp, synthetic construct
  misc_feature 1..20: note = chemically synthesized
  source 1..20: mol_type = other DNA
cagcaggtctggggcaggag

SEQ ID NO: 49217 - DNA, 20 bp, synthetic construct
  misc_feature 1..20: note = chemically synthesized
  source 1..20: mol_type = other DNA
ctggggcaggaggggggttg

SEQ ID NO: 49218 - DNA, 20 bp, synthetic construct
  misc_feature 1..20: note = chemically synthesized
  source 1..20: mol_type = other DNA
ggcaggaggggggttgtgga

SEQ ID NO: 49219 - DNA, 20 bp, synthetic construct
  misc_feature 1..20: note = chemically synthesized
  source 1..20: mol_type = other DNA
ttcataataacagcagccat

SEQ ID NO: 49220 - DNA, 20 bp, synthetic construct
  misc_feature 1..20: note = chemically synthesized
  source 1..20: mol_type = other DNA
tcccccctcggtacctcctg

SEQ ID NO: 49221 - DNA, 20 bp, synthetic construct
  misc_feature 1..20: note = chemically synthesized
  source 1..20: mol_type = other DNA
actggttcctgtaagcagaa

SEQ ID NO: 49222 - DNA, 20 bp, synthetic construct
  misc_feature 1..20: note = chemically synthesized
  source 1..20: mol_type = other DNA
tcctgtaagcagaagtggat

SEQ ID NO: 49223 - DNA, 20 bp, synthetic construct
  misc_feature 1..20: note = chemically synthesized
  source 1..20: mol_type = other DNA
ggtctgcagtcctggcaccc

SEQ ID NO: 49224 - DNA, 20 bp, synthetic construct
  misc_feature 1..20: note = chemically synthesized
  source 1..20: mol_type = other DNA
gaggaggttaaggtccagag

SEQ ID NO: 49225 - DNA, 20 bp, synthetic construct
  misc_feature 1..20: note = chemically synthesized
  source 1..20: mol_type = other DNA
tggtcatatctggaggggat

SEQ ID NO: 49226 - DNA, 20 bp, synthetic construct
  misc_feature 1..20: note = chemically synthesized
  source 1..20: mol_type = other DNA
acctcctcatctatagaagg

SEQ ID NO: 49227 - DNA, 20 bp, synthetic construct
  misc_feature 1..20: note = chemically synthesized
  source 1..20: mol_type = other DNA
cagacagaggagctgtgcaa

SEQ ID NO: 49228 - DNA, 20 bp, synthetic construct
  misc_feature 1..20: note = chemically synthesized
  source 1..20: mol_type = other DNA
cagaggagctgtgcaaacag

SEQ ID NO: 49229 - DNA, 20 bp, synthetic construct
  misc_feature 1..20: note = chemically synthesized
  source 1..20: mol_type = other DNA
aaggagtcattgtacctggc

SEQ ID NO: 49230 - DNA, 20 bp, synthetic construct
  misc_feature 1..20: note = chemically synthesized
  source 1..20: mol_type = other DNA
gctggccctctgctctcact

SEQ ID NO: 49231 - DNA, 20 bp, synthetic construct
  misc_feature 1..20: note = chemically synthesized
  source 1..20: mol_type = other DNA
gagacgggtactgggtgtgc

SEQ ID NO: 49232 - DNA, 20 bp, synthetic construct
  misc_feature 1..20: note = chemically synthesized
  source 1..20: mol_type = other DNA
tcacactgcccagaggatta

SEQ ID NO: 49233 - DNA, 20 bp, synthetic construct
  misc_feature 1..20: note = chemically synthesized
  source 1..20: mol_type = other DNA
tcttccctctgcagctggcc

SEQ ID NO: 49234 - DNA, 20 bp, synthetic construct
  misc_feature 1..20: note = chemically synthesized
  source 1..20: mol_type = other DNA
aaacaaaggcccagagaggg

SEQ ID NO: 49235 - DNA, 20 bp, synthetic construct
  misc_feature 1..20: note = chemically synthesized
  source 1..20: mol_type = other DNA
agagtgggggccatgtatcc

SEQ ID NO: 49236 - DNA, 20 bp, synthetic construct
  misc_feature 1..20: note = chemically synthesized
  source 1..20: mol_type = other DNA
ctggttttccaggagcaaaa

SEQ ID NO: 49237 - DNA, 20 bp, synthetic construct
  misc_feature 1..20: note = chemically synthesized
  source 1..20: mol_type = other DNA
tgtttctgtttttgctcctg

SEQ ID NO: 49238 - DNA, 20 bp, synthetic construct
  misc_feature 1..20: note = chemically synthesized
  source 1..20: mol_type = other DNA
gggggtcattgtgcagatgg

SEQ ID NO: 49239 - DNA, 20 bp, synthetic construct
  misc_feature 1..20: note = chemically synthesized
  source 1..20: mol_type = other DNA
cacactggttttccaggagc

SEQ ID NO: 49240 - DNA, 20 bp, synthetic construct
  misc_feature 1..20: note = chemically synthesized
  source 1..20: mol_type = other DNA
ccaagcagtaggagaggtgg

SEQ ID NO: 49241 - DNA, 20 bp, synthetic construct
  misc_feature 1..20: note = chemically synthesized
  source 1..20: mol_type = other DNA
gtgcaaacagaaagaaatgg

SEQ ID NO: 49242 - DNA, 20 bp, synthetic construct
  misc_feature 1..20: note = chemically synthesized
  source 1..20: mol_type = other DNA
acctagacaccctcatccac

SEQ ID NO: 49243 - DNA, 20 bp, synthetic construct
  misc_feature 1..20: note = chemically synthesized
  source 1..20: mol_type = other DNA
tctcgcagtgaaaggcatac

SEQ ID NO: 49244 - DNA, 20 bp, synthetic construct
  misc_feature 1..20: note = chemically synthesized
  source 1..20: mol_type = other DNA
gtcgcccgcctacgctgccc

SEQ ID NO: 49245 - DNA, 20 bp, synthetic construct
  misc_feature 1..20: note = chemically synthesized
  source 1..20: mol_type = other DNA
gacgctttgcctgggcagtg

SEQ ID NO: 49246 - DNA, 20 bp, synthetic construct
  misc_feature 1..20: note = chemically synthesized
  source 1..20: mol_type = other DNA
gagctgtgctgcctcaggca

SEQ ID NO: 49247 - DNA, 20 bp, synthetic construct
  misc_feature 1..20: note = chemically synthesized
  source 1..20: mol_type = other DNA
cttcacctctctgaaccagg

SEQ ID NO: 49248 - DNA, 20 bp, synthetic construct
  misc_feature 1..20: note = chemically synthesized
  source 1..20: mol_type = other DNA
cacctgcatcccaaagagtt

SEQ ID NO: 49249 - DNA, 20 bp, synthetic construct
  misc_feature 1..20: note = chemically synthesized
  source 1..20: mol_type = other DNA
gttggaagtttcattcccaa

SEQ ID NO: 49250 - DNA, 20 bp, synthetic construct
  misc_feature 1..20: note = chemically synthesized
  source 1..20: mol_type = other DNA
ttatgtgggtctgcacagcc

SEQ ID NO: 49251 - DNA, 20 bp, synthetic construct
  misc_feature 1..20: note = chemically synthesized
  source 1..20: mol_type = other DNA
tcaattttgaccagcctcag

SEQ ID NO: 49252 - DNA, 20 bp, synthetic construct
  misc_feature 1..20: note = chemically synthesized
  source 1..20: mol_type = other DNA
ttgaccagcctcaggcctgt

SEQ ID NO: 49253 - DNA, 20 bp, synthetic construct
  misc_feature 1..20: note = chemically synthesized
  source 1..20: mol_type = other DNA
gaaaaccagtgtgatccgta

SEQ ID NO: 49254 - DNA, 20 bp, synthetic construct
  misc_feature 1..20: note = chemically synthesized
  source 1..20: mol_type = other DNA
agtgtgatccgtatacagct

SEQ ID NO: 49255 - DNA, 20 bp, synthetic construct
  misc_feature 1..20: note = chemically synthesized
  source 1..20: mol_type = other DNA
gttgaggctagtggggcccc

SEQ ID NO: 49256 - DNA, 20 bp, synthetic construct
  misc_feature 1..20: note = chemically synthesized
  source 1..20: mol_type = other DNA
caatccctttaaaagcctaa

SEQ ID NO: 49257 - DNA, 20 bp, synthetic construct
  misc_feature 1..20: note = chemically synthesized
  source 1..20: mol_type = other DNA
gcccgctgtgcaacccgcaa

SEQ ID NO: 49258 - DNA, 20 bp, synthetic construct
  misc_feature 1..20: note = chemically synthesized
  source 1..20: mol_type = other DNA
tggctgtgaggcctcaggtg

SEQ ID NO: 49259 - DNA, 20 bp, synthetic construct
  misc_feature 1..20: note = chemically synthesized
  source 1..20: mol_type = other DNA
tgtaccttgttgagctgctg

SEQ ID NO: 49260 - DNA, 20 bp, synthetic construct
  misc_feature 1..20: note = chemically synthesized
  source 1..20: mol_type = other DNA
ggtggggtgggccacacttg

SEQ ID NO: 49261 - DNA, 20 bp, synthetic construct
  misc_feature 1..20: note = chemically synthesized
  source 1..20: mol_type = other DNA
ccttccctgcagctccatcc

SEQ ID NO: 49262 - DNA, 20 bp, synthetic construct
  misc_feature 1..20: note = chemically synthesized
  source 1..20: mol_type = other DNA
atttcttcccctctctgggc

SEQ ID NO: 49263 - DNA, 20 bp, synthetic construct
  misc_feature 1..20: note = chemically synthesized
  source 1..20: mol_type = other DNA
cagtaggctggggaggggcg

SEQ ID NO: 49264 - DNA, 20 bp, synthetic construct
  misc_feature 1..20: note = chemically synthesized
  source 1..20: mol_type = other DNA
gaggtacagtcacactgccc

SEQ ID NO: 49265 - DNA, 20 bp, synthetic construct
  misc_feature 1..20: note = chemically synthesized
  source 1..20: mol_type = other DNA
agacctggcaccaataactg

SEQ ID NO: 49266 - DNA, 20 bp, synthetic construct
  misc_feature 1..20: note = chemically synthesized
  source 1..20: mol_type = other DNA
caggtgacatgccgggctgt

SEQ ID NO: 49267 - DNA, 20 bp, synthetic construct
  misc_feature 1..20: note = chemically synthesized
  source 1..20: mol_type = other DNA
cctgtgcctgccagaagaga

SEQ ID NO: 49268 - DNA, 20 bp, synthetic construct
  misc_feature 1..20: note = chemically synthesized
  source 1..20: mol_type = other DNA
cagaagagacagagcttgag

SEQ ID NO: 49269 - DNA, 20 bp, synthetic construct
  misc_feature 1..20: note = chemically synthesized
  source 1..20: mol_type = other DNA
tccacaggtgggagggacag

SEQ ID NO: 49270 - DNA, 20 bp, synthetic construct
  misc_feature 1..20: note = chemically synthesized
  source 1..20: mol_type = other DNA
gaaggggaggggagtctgag

SEQ ID NO: 49271 - DNA, 20 bp, synthetic construct
  misc_feature 1..20: note = chemically synthesized
  source 1..20: mol_type = other DNA
ggagggagggcagcatcagg

SEQ ID NO: 49272 - DNA, 20 bp, synthetic construct
  misc_feature 1..20: note = chemically synthesized
  source 1..20: mol_type = other DNA
ggcacacccagtacccgtct

SEQ ID NO: 49273 - DNA, 20 bp, synthetic construct
  misc_feature 1..20: note = chemically synthesized
  source 1..20: mol_type = other DNA
gcacgtacgccagctcccaa

SEQ ID NO: 49274 - DNA, 20 bp, synthetic construct
  misc_feature 1..20: note = chemically synthesized
  source 1..20: mol_type = other DNA
gttgcacagcgggcgatgca

SEQ ID NO: 49275 - DNA, 20 bp, synthetic construct
  misc_feature 1..20: note = chemically synthesized
  source 1..20: mol_type = other DNA
agcgggcgatgcaatctgat

SEQ ID NO: 49276 - DNA, 20 bp, synthetic construct
  misc_feature 1..20: note = chemically synthesized
  source 1..20: mol_type = other DNA
caatctgatttaggctttta

SEQ ID NO: 49277 - DNA, 20 bp, synthetic construct
  misc_feature 1..20: note = chemically synthesized
  source 1..20: mol_type = other DNA
ccaagctgtatacggatcac

SEQ ID NO: 49278 - DNA, 20 bp, synthetic construct
  misc_feature 1..20: note = chemically synthesized
  source 1..20: mol_type = other DNA
tcacccgaggcacttcacaa

SEQ ID NO: 49279 - DNA, 20 bp, synthetic construct
  misc_feature 1..20: note = chemically synthesized
  source 1..20: mol_type = other DNA
agcacagctcttctttacag

SEQ ID NO: 49280 - DNA, 20 bp, synthetic construct
  misc_feature 1..20: note = chemically synthesized
  source 1..20: mol_type = other DNA
ttccatcgggaccatcaaga

SEQ ID NO: 49281 - DNA, 20 bp, synthetic construct
  misc_feature 1..20: note = chemically synthesized
  source 1..20: mol_type = other DNA
gagcggtctctccgctctga

SEQ ID NO: 49282 - DNA, 20 bp, synthetic construct
  misc_feature 1..20: note = chemically synthesized
  source 1..20: mol_type = other DNA
gctaccagtggaacagccac

SEQ ID NO: 49283 - DNA, 20 bp, synthetic construct
  misc_feature 1..20: note = chemically synthesized
  source 1..20: mol_type = other DNA
ccaccttggacacaggacgc

SEQ ID NO: 49284 - DNA, 20 bp, synthetic construct
  misc_feature 1..20: note = chemically synthesized
  source 1..20: mol_type = other DNA
tcccagccagtggacttagc

SEQ ID NO: 49285 - DNA, 20 bp, synthetic construct
  misc_feature 1..20: note = chemically synthesized
  source 1..20: mol_type = other DNA
ccccgttgcccctctggatc

SEQ ID NO: 49286 - DNA, 20 bp, synthetic construct
  misc_feature 1..20: note = chemically synthesized
  source 1..20: mol_type = other DNA
cgaggacagggccctgtctc

SEQ ID NO: 49287 - DNA, 20 bp, synthetic construct
  misc_feature 1..20: note = chemically synthesized
  source 1..20: mol_type = other DNA
ttcactgcgagaggttctgg

SEQ ID NO: 49288 - DNA, 20 bp, synthetic construct
  misc_feature 1..20: note = chemically synthesized
  source 1..20: mol_type = other DNA
cagcagccatgagggttgtg

SEQ ID NO: 49289 - DNA, 20 bp, synthetic construct
  misc_feature 1..20: note = chemically synthesized
  source 1..20: mol_type = other DNA
aacaaagcgcagccatttct

SEQ ID NO: 49290 - DNA, 20 bp, synthetic construct
  misc_feature 1..20: note = chemically synthesized
  source 1..20: mol_type = other DNA
ataagcctcaccacctctcc

SEQ ID NO: 49291 - DNA, 22 bp, synthetic construct
  misc_feature 1..22: note = chemically synthesized
  source 1..22: mol_type = other DNA
aggcctggcacaggtctgttcc

SEQ ID NO: 49292 - DNA, 22 bp, synthetic construct
  misc_feature 1..22: note = chemically synthesized
  source 1..22: mol_type = other DNA
gcacaggtctgttcctggtcat

SEQ ID NO: 49293 - DNA, 22 bp, synthetic construct
  misc_feature 1..22: note = chemically synthesized
  source 1..22: mol_type = other DNA
ttcctggtcatatctggagggg

SEQ ID NO: 49294 - DNA, 22 bp, synthetic construct
  misc_feature 1..22: note = chemically synthesized
  source 1..22: mol_type = other DNA
ctggtcatatctggaggggatg

SEQ ID NO: 49295 - DNA, 22 bp, synthetic construct
  misc_feature 1..22: note = chemically synthesized
  source 1..22: mol_type = other DNA
gtcatatctggaggggatggag

SEQ ID NO: 49296 - DNA, 22 bp, synthetic construct
  misc_feature 1..22: note = chemically synthesized
  source 1..22: mol_type = other DNA
gaggggatggagaatgtgagcc

SEQ ID NO: 49297 - DNA, 22 bp, synthetic construct
  misc_feature 1..22: note = chemically synthesized
  source 1..22: mol_type = other DNA
ctccccacccctctctggacct

SEQ ID NO: 49298 - DNA, 22 bp, synthetic construct
  misc_feature 1..22: note = chemically synthesized
  source 1..22: mol_type = other DNA
cccacccctctctggaccttaa

SEQ ID NO: 49299 - DNA, 22 bp, synthetic construct
  misc_feature 1..22: note = chemically synthesized
  source 1..22: mol_type = other DNA
tctggaccttaacctcctcatc

SEQ ID NO: 49300 - DNA, 22 bp, synthetic construct
  misc_feature 1..22: note = chemically synthesized
  source 1..22: mol_type = other DNA
tggaccttaacctcctcatcta

SEQ ID NO: 49301 - DNA, 22 bp, synthetic construct
  misc_feature 1..22: note = chemically synthesized
  source 1..22: mol_type = other DNA
gaccttaacctcctcatctata

SEQ ID NO: 49302 - DNA, 22 bp, synthetic construct
  misc_feature 1..22: note = chemically synthesized
  source 1..22: mol_type = other DNA
aacctcctcatctatagaaggg

SEQ ID NO: 49303 - DNA, 22 bp, synthetic construct
  misc_feature 1..22: note = chemically synthesized
  source 1..22: mol_type = other DNA
acctcctcatctatagaagggg

SEQ ID NO: 49304 - DNA, 22 bp, synthetic construct
  misc_feature 1..22: note = chemically synthesized
  source 1..22: mol_type = other DNA
ctcatctatagaaggggagaaa

SEQ ID NO: 49305 - DNA, 22 bp, synthetic construct
  misc_feature 1..22: note = chemically synthesized
  source 1..22: mol_type = other DNA
atctatagaaggggagaaagat

SEQ ID NO: 49306 - DNA, 22 bp, synthetic construct
  misc_feature 1..22: note = chemically synthesized
  source 1..22: mol_type = other DNA
tagaaggggagaaagatgcatg

SEQ ID NO: 49307 - DNA, 22 bp, synthetic construct
  misc_feature 1..22: note = chemically synthesized
  source 1..22: mol_type = other DNA
ataggagacaacagacaggagc

SEQ ID NO: 49308 - DNA, 22 bp, synthetic construct
  misc_feature 1..22: note = chemically synthesized
  source 1..22: mol_type = other DNA
taggagacaacagacaggagcc

SEQ ID NO: 49309 - DNA, 22 bp, synthetic construct
  misc_feature 1..22: note = chemically synthesized
  source 1..22: mol_type = other DNA
tgcaaacagaaagaaatggctg

SEQ ID NO: 49310 - DNA, 22 bp, synthetic construct
  misc_feature 1..22: note = chemically synthesized
  source 1..22: mol_type = other DNA
cgctttgttgctgttgctgtat

SEQ ID NO: 49311 - DNA, 22 bp, synthetic construct
  misc_feature 1..22: note = chemically synthesized
  source 1..22: mol_type = other DNA
tgttgctgttgctgtatcttgg

SEQ ID NO: 49312 - DNA, 22 bp, synthetic construct
  misc_feature 1..22: note = chemically synthesized
  source 1..22: mol_type = other DNA
gttgctgttgctgtatcttggc

SEQ ID NO: 49313 - DNA, 22 bp, synthetic construct
  misc_feature 1..22: note = chemically synthesized
  source 1..22: mol_type = other DNA
ttgctgttgctgtatcttggct

SEQ ID NO: 49314 - DNA, 22 bp, synthetic construct
  misc_feature 1..22: note = chemically synthesized
  source 1..22: mol_type = other DNA
ctgttgctgtatcttggctggt

SEQ ID NO: 49315 - DNA, 22 bp, synthetic construct
  misc_feature 1..22: note = chemically synthesized
  source 1..22: mol_type = other DNA
ttgctgtatcttggctggtgtc

SEQ ID NO: 49316 - DNA, 22 bp, synthetic construct
  misc_feature 1..22: note = chemically synthesized
  source 1..22: mol_type = other DNA
ctgtatcttggctggtgtcccc

SEQ ID NO: 49317 - DNA, 22 bp, synthetic construct
  misc_feature 1..22: note = chemically synthesized
  source 1..22: mol_type = other DNA
tatcttggctggtgtcccccat

SEQ ID NO: 49318 - DNA, 22 bp, synthetic construct
  misc_feature 1..22: note = chemically synthesized
  source 1..22: mol_type = other DNA
ggctggtgtcccccatcctggg

SEQ ID NO: 49319 - DNA, 22 bp, synthetic construct
  misc_feature 1..22: note = chemically synthesized
  source 1..22: mol_type = other DNA
gctggtgtcccccatcctgggg

SEQ ID NO: 49320 - DNA, 22 bp, synthetic construct
  misc_feature 1..22: note = chemically synthesized
  source 1..22: mol_type = other DNA
gtgtcccccatcctggggtgcc

SEQ ID NO: 49321 - DNA, 22 bp, synthetic construct
  misc_feature 1..22: note = chemically synthesized
  source 1..22: mol_type = other DNA
gggtgccaggactgcagaccta

SEQ ID NO: 49322 - DNA, 22 bp, synthetic construct
  misc_feature 1..22: note = chemically synthesized
  source 1..22: mol_type = other DNA
cagacctagacaccctcatcca

SEQ ID NO: 49323 - DNA, 22 bp, synthetic construct
  misc_feature 1..22: note = chemically synthesized
  source 1..22: mol_type = other DNA
gacaccctcatccacttctgct

SEQ ID NO: 49324 - DNA, 22 bp, synthetic construct
  misc_feature 1..22: note = chemically synthesized
  source 1..22: mol_type = other DNA
atccacttctgcttacaggaac

SEQ ID NO: 49325 - DNA, 22 bp, synthetic construct
  misc_feature 1..22: note = chemically synthesized
  source 1..22: mol_type = other DNA
ctgcttacaggaaccagtgtat

SEQ ID NO: 49326 - DNA, 22 bp, synthetic construct
  misc_feature 1..22: note = chemically synthesized
  source 1..22: mol_type = other DNA
tgcttacaggaaccagtgtatc

SEQ ID NO: 49327 - DNA, 22 bp, synthetic construct
  misc_feature 1..22: note = chemically synthesized
  source 1..22: mol_type = other DNA
cttacaggaaccagtgtatcca

SEQ ID NO: 49328 - DNA, 22 bp, synthetic construct
  misc_feature 1..22: note = chemically synthesized
  source 1..22: mol_type = other DNA
acaggaaccagtgtatccacca

SEQ ID NO: 49329 - DNA, 22 bp, synthetic construct
  misc_feature 1..22: note = chemically synthesized
  source 1..22: mol_type = other DNA
caggaaccagtgtatccaccag

SEQ ID NO: 49330 - DNA, 22 bp, synthetic construct
  misc_feature 1..22: note = chemically synthesized
  source 1..22: mol_type = other DNA
ggaaacaggacacaaccctcat

SEQ ID NO: 49331 - DNA, 22 bp, synthetic construct
  misc_feature 1..22: note = chemically synthesized
  source 1..22: mol_type = other DNA
atggctgctgttattatgaaaa

SEQ ID NO: 49332 - DNA, 22 bp, synthetic construct
  misc_feature 1..22: note = chemically synthesized
  source 1..22: mol_type = other DNA
ctgttattatgaaaataggagc

SEQ ID NO: 49333 - DNA, 22 bp, synthetic construct
  misc_feature 1..22: note = chemically synthesized
  source 1..22: mol_type = other DNA
ttattatgaaaataggagctca

SEQ ID NO: 49334 - DNA, 22 bp, synthetic construct
  misc_feature 1..22: note = chemically synthesized
  source 1..22: mol_type = other DNA
ttatgaaaataggagctcagct

SEQ ID NO: 49335 - DNA, 22 bp, synthetic construct
  misc_feature 1..22: note = chemically synthesized
  source 1..22: mol_type = other DNA
tgaaaataggagctcagctgca

SEQ ID NO: 49336 - DNA, 22 bp, synthetic construct
  misc_feature 1..22: note = chemically synthesized
  source 1..22: mol_type = other DNA
agctgcagcctctccatctgcc

SEQ ID NO: 49337 - DNA, 22 bp, synthetic construct
  misc_feature 1..22: note = chemically synthesized
  source 1..22: mol_type = other DNA
cagcctctccatctgccctgca

SEQ ID NO: 49338 - DNA, 22 bp, synthetic construct
  misc_feature 1..22: note = chemically synthesized
  source 1..22: mol_type = other DNA
tccatctgccctgcacctcagc

SEQ ID NO: 49339 - DNA, 22 bp, synthetic construct
  misc_feature 1..22: note = chemically synthesized
  source 1..22: mol_type = other DNA
catctgccctgcacctcagcag

SEQ ID NO: 49340 - DNA, 22 bp, synthetic construct
  misc_feature 1..22: note = chemically synthesized
  source 1..22: mol_type = other DNA
ccctgcacctcagcaggcggat

SEQ ID NO: 49341 - DNA, 22 bp, synthetic construct
  misc_feature 1..22: note = chemically synthesized
  source 1..22: mol_type = other DNA
cacctcagcaggcggataccca

SEQ ID NO: 49342 - DNA, 22 bp, synthetic construct
  misc_feature 1..22: note = chemically synthesized
  source 1..22: mol_type = other DNA
agcaggcggatacccactccac

SEQ ID NO: 49343 - DNA, 22 bp, synthetic construct
  misc_feature 1..22: note = chemically synthesized
  source 1..22: mol_type = other DNA
cacaacccccctcctgccccag

SEQ ID NO: 49344 - DNA, 22 bp, synthetic construct
  misc_feature 1..22: note = chemically synthesized
  source 1..22: mol_type = other DNA
ctgccccagacctgctgcctgc

SEQ ID NO: 49345 - DNA, 22 bp, synthetic construct
  misc_feature 1..22: note = chemically synthesized
  source 1..22: mol_type = other DNA
ccccagacctgctgcctgcctg

SEQ ID NO: 49346 - DNA, 22 bp, synthetic construct
  misc_feature 1..22: note = chemically synthesized
  source 1..22: mol_type = other DNA
ctgcctgcctgggccatgggga

SEQ ID NO: 49347 - DNA, 22 bp, synthetic construct
  misc_feature 1..22: note = chemically synthesized
  source 1..22: mol_type = other DNA
cctgcctgggccatggggagct

SEQ ID NO: 49348 - DNA, 22 bp, synthetic construct
  misc_feature 1..22: note = chemically synthesized
  source 1..22: mol_type = other DNA
cctgggccatggggagctcaga

SEQ ID NO: 49349 - DNA, 22 bp, synthetic construct
  misc_feature 1..22: note = chemically synthesized
  source 1..22: mol_type = other DNA
ggccatggggagctcagaagcc

SEQ ID NO: 49350 - DNA, 22 bp, synthetic construct
  misc_feature 1..22: note = chemically synthesized
  source 1..22: mol_type = other DNA
agaagcctctccagaacctctc

SEQ ID NO: 49351 - DNA, 22 bp, synthetic construct
  misc_feature 1..22: note = chemically synthesized
  source 1..22: mol_type = other DNA
tccagaacctctcgcagtgaaa

SEQ ID NO: 49352 - DNA, 22 bp, synthetic construct
  misc_feature 1..22: note = chemically synthesized
  source 1..22: mol_type = other DNA
cagaacctctcgcagtgaaagg

SEQ ID NO: 49353 - DNA, 22 bp, synthetic construct
  misc_feature 1..22: note = chemically synthesized
  source 1..22: mol_type = other DNA
tcgcagtgaaaggcatacttac

SEQ ID NO: 49354 - DNA, 22 bp, synthetic construct
  misc_feature 1..22: note = chemically synthesized
  source 1..22: mol_type = other DNA
gcagtgaaaggcatacttacga

SEQ ID NO: 49355 - DNA, 22 bp, synthetic construct
  misc_feature 1..22: note = chemically synthesized
  source 1..22: mol_type = other DNA
acgattcactgtcccaggtcag

SEQ ID NO: 49356 - DNA, 22 bp, synthetic construct
  misc_feature 1..22: note = chemically synthesized
  source 1..22: mol_type = other DNA
cgattcactgtcccaggtcagt

SEQ ID NO: 49357 - DNA, 22 bp, synthetic construct
  misc_feature 1..22: note = chemically synthesized
  source 1..22: mol_type = other DNA
actgtcccaggtcagtggtggt

SEQ ID NO: 49358 - DNA, 22 bp, synthetic construct
  misc_feature 1..22: note = chemically synthesized
  source 1..22: mol_type = other DNA
tcccaggtcagtggtggtgcct

SEQ ID NO: 49359 - DNA, 22 bp, synthetic construct
  misc_feature 1..22: note = chemically synthesized
  source 1..22: mol_type = other DNA
aagctgaggagacagggccctg

SEQ ID NO: 49360 - DNA, 22 bp, synthetic construct
  misc_feature 1..22: note = chemically synthesized
  source 1..22: mol_type = other DNA
aggagacagggccctgtcctcg

SEQ ID NO: 49361 - DNA, 22 bp, synthetic construct
  misc_feature 1..22: note = chemically synthesized
  source 1..22: mol_type = other DNA
tcctcgtccgtatttaagcagt

SEQ ID NO: 49362 - DNA, 22 bp, synthetic construct
  misc_feature 1..22: note = chemically synthesized
  source 1..22: mol_type = other DNA
gtccgtatttaagcagtggatc

SEQ ID NO: 49363 - DNA, 22 bp, synthetic construct
  misc_feature 1..22: note = chemically synthesized
  source 1..22: mol_type = other DNA
aagcagtggatccagaggggca

SEQ ID NO: 49364 - DNA, 22 bp, synthetic construct
  misc_feature 1..22: note = chemically synthesized
  source 1..22: mol_type = other DNA
agcagtggatccagaggggcaa

SEQ ID NO: 49365 - DNA, 22 bp, synthetic construct
  misc_feature 1..22: note = chemically synthesized
  source 1..22: mol_type = other DNA
ctggtgaatattaaccaaggtc

SEQ ID NO: 49366 - DNA, 22 bp, synthetic construct
  misc_feature 1..22: note = chemically synthesized
  source 1..22: mol_type = other DNA
gtgaatattaaccaaggtcacc

SEQ ID NO: 49367 - DNA, 22 bp, synthetic construct
  misc_feature 1..22: note = chemically synthesized
  source 1..22: mol_type = other DNA
accaaggtcaccccagttatcg

SEQ ID NO: 49368 - DNA, 22 bp, synthetic construct
  misc_feature 1..22: note = chemically synthesized
  source 1..22: mol_type = other DNA
tcggaggagcaaacaggggcta

SEQ ID NO: 49369 - DNA, 22 bp, synthetic construct
  misc_feature 1..22: note = chemically synthesized
  source 1..22: mol_type = other DNA
agtccactggctgggatctgag

SEQ ID NO: 49370 - DNA, 22 bp, synthetic construct
  misc_feature 1..22: note = chemically synthesized
  source 1..22: mol_type = other DNA
gctgggatctgagtcgcccgcc

SEQ ID NO: 49371 - DNA, 22 bp, synthetic construct
  misc_feature 1..22: note = chemically synthesized
  source 1..22: mol_type = other DNA
ggatctgagtcgcccgcctacg

SEQ ID NO: 49372 - DNA, 22 bp, synthetic construct
  misc_feature 1..22: note = chemically synthesized
  source 1..22: mol_type = other DNA
agtcgcccgcctacgctgcccg

SEQ ID NO: 49373 - DNA, 22 bp, synthetic construct
  misc_feature 1..22: note = chemically synthesized
  source 1..22: mol_type = other DNA
cgctgcccggacgctttgcctg

SEQ ID NO: 49374 - DNA, 22 bp, synthetic construct
  misc_feature 1..22: note = chemically synthesized
  source 1..22: mol_type = other DNA
cccggacgctttgcctgggcag

SEQ ID NO: 49375 - DNA, 22 bp, synthetic construct
  misc_feature 1..22: note = chemically synthesized
  source 1..22: mol_type = other DNA
tgcctgggcagtgtacagcttc

SEQ ID NO: 49376 - DNA, 22 bp, synthetic construct
  misc_feature 1..22: note = chemically synthesized
  source 1..22: mol_type = other DNA
gcctgggcagtgtacagcttcc

SEQ ID NO: 49377 - DNA, 22 bp, synthetic construct
  misc_feature 1..22: note = chemically synthesized
  source 1..22: mol_type = other DNA
cctgggcagtgtacagcttcca

SEQ ID NO: 49378 - DNA, 22 bp, synthetic construct
  misc_feature 1..22: note = chemically synthesized
  source 1..22: mol_type = other DNA
ggcagtgtacagcttccactgc

SEQ ID NO: 49379 - DNA, 22 bp, synthetic construct
  misc_feature 1..22: note = chemically synthesized
  source 1..22: mol_type = other DNA
ccactgcacttaccgaaaggag

SEQ ID NO: 49380 - DNA, 22 bp, synthetic construct
  misc_feature 1..22: note = chemically synthesized
  source 1..22: mol_type = other DNA
cactgcacttaccgaaaggagt

SEQ ID NO: 49381 - DNA, 22 bp, synthetic construct
  misc_feature 1..22: note = chemically synthesized
  source 1..22: mol_type = other DNA
cacttaccgaaaggagtcattg

SEQ ID NO: 49382 - DNA, 22 bp, synthetic construct
  misc_feature 1..22: note = chemically synthesized
  source 1..22: mol_type = other DNA
accgaaaggagtcattgtacct

SEQ ID NO: 49383 - DNA, 22 bp, synthetic construct
  misc_feature 1..22: note = chemically synthesized
  source 1..22: mol_type = other DNA
ccgaaaggagtcattgtacctg

SEQ ID NO: 49384 - DNA, 22 bp, synthetic construct
  misc_feature 1..22: note = chemically synthesized
  source 1..22: mol_type = other DNA
tacctggctcagaaaccacagc

SEQ ID NO: 49385 - DNA, 22 bp, synthetic construct
  misc_feature 1..22: note = chemically synthesized
  source 1..22: mol_type = other DNA
gctcagaaaccacagcgtcctg

SEQ ID NO: 49386 - DNA, 22 bp, synthetic construct
  misc_feature 1..22: note = chemically synthesized
  source 1..22: mol_type = other DNA
agaaaccacagcgtcctgtgtc

SEQ ID NO: 49387 - DNA, 22 bp, synthetic construct
  misc_feature 1..22: note = chemically synthesized
  source 1..22: mol_type = other DNA
tgtccaaggtggagggggtggc

SEQ ID NO: 49388 - DNA, 22 bp, synthetic construct
  misc_feature 1..22: note = chemically synthesized
  source 1..22: mol_type = other DNA
tgggagagtaccacttagctgg

SEQ ID NO: 49389 - DNA, 22 bp, synthetic construct
  misc_feature 1..22: note = chemically synthesized
  source 1..22: mol_type = other DNA
ggagagtaccacttagctggcc

SEQ ID NO: 49390 - DNA, 22 bp, synthetic construct
  misc_feature 1..22: note = chemically synthesized
  source 1..22: mol_type = other DNA
agctggccctctgctctcactg

SEQ ID NO: 49391 - DNA, 22 bp, synthetic construct
  misc_feature 1..22: note = chemically synthesized
  source 1..22: mol_type = other DNA
gctggccctctgctctcactgc

SEQ ID NO: 49392 - DNA, 22 bp, synthetic construct
  misc_feature 1..22: note = chemically synthesized
  source 1..22: mol_type = other DNA
gccctctgctctcactgcagaa

SEQ ID NO: 49393 - DNA, 22 bp, synthetic construct
  misc_feature 1..22: note = chemically synthesized
  source 1..22: mol_type = other DNA
tgctctcactgcagaatcctta

SEQ ID NO: 49394 - DNA, 22 bp, synthetic construct
  misc_feature 1..22: note = chemically synthesized
  source 1..22: mol_type = other DNA
ctctcactgcagaatccttagt

SEQ ID NO: 49395 - DNA, 22 bp, synthetic construct
  misc_feature 1..22: note = chemically synthesized
  source 1..22: mol_type = other DNA
tcactgcagaatccttagtggc

SEQ ID NO: 49396 - DNA, 22 bp, synthetic construct
  misc_feature 1..22: note = chemically synthesized
  source 1..22: mol_type = other DNA
actgcagaatccttagtggctg

SEQ ID NO: 49397 - DNA, 22 bp, synthetic construct
  misc_feature 1..22: note = chemically synthesized
  source 1..22: mol_type = other DNA
cagaatccttagtggctgttcc

SEQ ID NO: 49398 - DNA, 22 bp, synthetic construct
  misc_feature 1..22: note = chemically synthesized
  source 1..22: mol_type = other DNA
agtggctgttccactggtagca

SEQ ID NO: 49399 - DNA, 22 bp, synthetic construct
  misc_feature 1..22: note = chemically synthesized
  source 1..22: mol_type = other DNA
gtggctgttccactggtagcaa

SEQ ID NO: 49400 - DNA, 22 bp, synthetic construct
  misc_feature 1..22: note = chemically synthesized
  source 1..22: mol_type = other DNA
ttccactggtagcaagatctac

SEQ ID NO: 49401 - DNA, 22 bp, synthetic construct
  misc_feature 1..22: note = chemically synthesized
  source 1..22: mol_type = other DNA
cactggtagcaagatctaccat

SEQ ID NO: 49402 - DNA, 22 bp, synthetic construct
  misc_feature 1..22: note = chemically synthesized
  source 1..22: mol_type = other DNA
gtagcaagatctaccatttact

SEQ ID NO: 49403 - DNA, 22 bp, synthetic construct
  misc_feature 1..22: note = chemically synthesized
  source 1..22: mol_type = other DNA
ccatttactgagtcaccccaaa

SEQ ID NO: 49404 - DNA, 22 bp, synthetic construct
  misc_feature 1..22: note = chemically synthesized
  source 1..22: mol_type = other DNA
actgagtcaccccaaaatgcct

SEQ ID NO: 49405 - DNA, 22 bp, synthetic construct
  misc_feature 1..22: note = chemically synthesized
  source 1..22: mol_type = other DNA
ctgagtcaccccaaaatgcctg

SEQ ID NO: 49406 - DNA, 22 bp, synthetic construct
  misc_feature 1..22: note = chemically synthesized
  source 1..22: mol_type = other DNA
agtcaccccaaaatgcctgatg

SEQ ID NO: 49407 - DNA, 22 bp, synthetic construct
  misc_feature 1..22: note = chemically synthesized
  source 1..22: mol_type = other DNA
atgctgaagacttactgccgcc

SEQ ID NO: 49408 - DNA, 22 bp, synthetic construct
  misc_feature 1..22: note = chemically synthesized
  source 1..22: mol_type = other DNA
aagacttactgccgccctggga

SEQ ID NO: 49409 - DNA, 22 bp, synthetic construct
  misc_feature 1..22: note = chemically synthesized
  source 1..22: mol_type = other DNA
actgccgccctgggagatcaga

SEQ ID NO: 49410 - DNA, 22 bp, synthetic construct
  misc_feature 1..22: note = chemically synthesized
  source 1..22: mol_type = other DNA
ctgccgccctgggagatcagag

SEQ ID NO: 49411 - DNA, 22 bp, synthetic construct
  misc_feature 1..22: note = chemically synthesized
  source 1..22: mol_type = other DNA
ccgccctgggagatcagagtgg

SEQ ID NO: 49412 - DNA, 22 bp, synthetic construct
  misc_feature 1..22: note = chemically synthesized
  source 1..22: mol_type = other DNA
ggagatcagagtgggttagagc

SEQ ID NO: 49413 - DNA, 22 bp, synthetic construct
  misc_feature 1..22: note = chemically synthesized
  source 1..22: mol_type = other DNA
gagcccatttgacagatgagga

SEQ ID NO: 49414 - DNA, 22 bp, synthetic construct
  misc_feature 1..22: note = chemically synthesized
  source 1..22: mol_type = other DNA
gacagatgaggaaacaggctca

SEQ ID NO: 49415 - DNA, 22 bp, synthetic construct
  misc_feature 1..22: note = chemically synthesized
  source 1..22: mol_type = other DNA
acagatgaggaaacaggctcag

SEQ ID NO: 49416 - DNA, 22 bp, synthetic construct
  misc_feature 1..22: note = chemically synthesized
  source 1..22: mol_type = other DNA
agagcggagagaccgctcatcc

SEQ ID NO: 49417 - DNA, 22 bp, synthetic construct
  misc_feature 1..22: note = chemically synthesized
  source 1..22: mol_type = other DNA
atccaaagttacccagtcagcc

SEQ ID NO: 49418 - DNA, 22 bp, synthetic construct
  misc_feature 1..22: note = chemically synthesized
  source 1..22: mol_type = other DNA
cccagtcagccttagacacaaa

SEQ ID NO: 49419 - DNA, 22 bp, synthetic construct
  misc_feature 1..22: note = chemically synthesized
  source 1..22: mol_type = other DNA
agacacaaacaccctcttgatg

SEQ ID NO: 49420 - DNA, 22 bp, synthetic construct
  misc_feature 1..22: note = chemically synthesized
  source 1..22: mol_type = other DNA
gacacaaacaccctcttgatgg

SEQ ID NO: 49421 - DNA, 22 bp, synthetic construct
  misc_feature 1..22: note = chemically synthesized
  source 1..22: mol_type = other DNA
ttgatggtcccgatggaaaaat

SEQ ID NO: 49422 - DNA, 22 bp, synthetic construct
  misc_feature 1..22: note = chemically synthesized
  source 1..22: mol_type = other DNA
gatggtcccgatggaaaaatgg

SEQ ID NO: 49423 - DNA, 22 bp, synthetic construct
  misc_feature 1..22: note = chemically synthesized
  source 1..22: mol_type = other DNA
atggtcccgatggaaaaatgga

SEQ ID NO: 49424 - DNA, 22 bp, synthetic construct
  misc_feature 1..22: note = chemically synthesized
  source 1..22: mol_type = other DNA
aggcagacacaaccgtcaggct

SEQ ID NO: 49425 - DNA, 22 bp, synthetic construct
  misc_feature 1..22: note = chemically synthesized
  source 1..22: mol_type = other DNA
gcatggggggccgtgagacagg

SEQ ID NO: 49426 - DNA, 22 bp, synthetic construct
  misc_feature 1..22: note = chemically synthesized
  source 1..22: mol_type = other DNA
taaagaagagctgtgctgcctc

SEQ ID NO: 49427 - DNA, 22 bp, synthetic construct
  misc_feature 1..22: note = chemically synthesized
  source 1..22: mol_type = other DNA
tgctgcctcaggcaggccgctt

SEQ ID NO: 49428 - DNA, 22 bp, synthetic construct
  misc_feature 1..22: note = chemically synthesized
  source 1..22: mol_type = other DNA
cctcaggcaggccgcttcacct

SEQ ID NO: 49429 - DNA, 22 bp, synthetic construct
  misc_feature 1..22: note = chemically synthesized
  source 1..22: mol_type = other DNA
aggcaggccgcttcacctctct

SEQ ID NO: 49430 - DNA, 22 bp, synthetic construct
  misc_feature 1..22: note = chemically synthesized
  source 1..22: mol_type = other DNA
cacctctctgaaccaggaactg

SEQ ID NO: 49431 - DNA, 22 bp, synthetic construct
  misc_feature 1..22: note = chemically synthesized
  source 1..22: mol_type = other DNA
acctctctgaaccaggaactgt

SEQ ID NO: 49432 - DNA, 22 bp, synthetic construct
  misc_feature 1..22: note = chemically synthesized
  source 1..22: mol_type = other DNA
tctgaaccaggaactgtttcac

SEQ ID NO: 49433 - DNA, 22 bp, synthetic construct
  misc_feature 1..22: note = chemically synthesized
  source 1..22: mol_type = other DNA
tgaaccaggaactgtttcacct

SEQ ID NO: 49434 - DNA, 22 bp, synthetic construct
  misc_feature 1..22: note = chemically synthesized
  source 1..22: mol_type = other DNA
aaccaggaactgtttcacctgc

SEQ ID NO: 49435 - DNA, 22 bp, synthetic construct
  misc_feature 1..22: note = chemically synthesized
  source 1..22: mol_type = other DNA
tttcacctgcatcccaaagagt

SEQ ID NO: 49436 - DNA, 22 bp, synthetic construct
  misc_feature 1..22: note = chemically synthesized
  source 1..22: mol_type = other DNA
cacctgcatcccaaagagttgg

SEQ ID NO: 49437 - DNA, 22 bp, synthetic construct
  misc_feature 1..22: note = chemically synthesized
  source 1..22: mol_type = other DNA
acctgcatcccaaagagttgga

SEQ ID NO: 49438 - DNA, 22 bp, synthetic construct
  misc_feature 1..22: note = chemically synthesized
  source 1..22: mol_type = other DNA
catcccaaagagttggaagttt

SEQ ID NO: 49439 - DNA, 22 bp, synthetic construct
  misc_feature 1..22: note = chemically synthesized
  source 1..22: mol_type = other DNA
gaagtttcattcccaagcatgc

SEQ ID NO: 49440 - DNA, 22 bp, synthetic construct
  misc_feature 1..22: note = chemically synthesized
  source 1..22: mol_type = other DNA
cattcccaagcatgcttgtgaa

SEQ ID NO: 49441 - DNA, 22 bp, synthetic construct
  misc_feature 1..22: note = chemically synthesized
  source 1..22: mol_type = other DNA
attcccaagcatgcttgtgaag

SEQ ID NO: 49442 - DNA, 22 bp, synthetic construct
  misc_feature 1..22: note = chemically synthesized
  source 1..22: mol_type = other DNA
ccaagcatgcttgtgaagtgcc

SEQ ID NO: 49443 - DNA, 22 bp, synthetic construct
  misc_feature 1..22: note = chemically synthesized
  source 1..22: mol_type = other DNA
gtgaagtgcctcgggtgaagtg

SEQ ID NO: 49444 - DNA, 22 bp, synthetic construct
  misc_feature 1..22: note = chemically synthesized
  source 1..22: mol_type = other DNA
tgaagtgcctcgggtgaagtgc

SEQ ID NO: 49445 - DNA, 22 bp, synthetic construct
  misc_feature 1..22: note = chemically synthesized
  source 1..22: mol_type = other DNA
gggtgaagtgcctggcacacag

SEQ ID NO: 49446 - DNA, 22 bp, synthetic construct
  misc_feature 1..22: note = chemically synthesized
  source 1..22: mol_type = other DNA
gcacacagtaggctctttatgt

SEQ ID NO: 49447 - DNA, 22 bp, synthetic construct
  misc_feature 1..22: note = chemically synthesized
  source 1..22: mol_type = other DNA
tttatgtgggtctgcacagccc

SEQ ID NO: 49448 - DNA, 22 bp, synthetic construct
  misc_feature 1..22: note = chemically synthesized
  source 1..22: mol_type = other DNA
tatgtgggtctgcacagccctc

SEQ ID NO: 49449 - DNA, 22 bp, synthetic construct
  misc_feature 1..22: note = chemically synthesized
  source 1..22: mol_type = other DNA
atgtgggtctgcacagccctct

SEQ ID NO: 49450 - DNA, 22 bp, synthetic construct
  misc_feature 1..22: note = chemically synthesized
  source 1..22: mol_type = other DNA
tgtgggtctgcacagccctctg

SEQ ID NO: 49451 - DNA, 22 bp, synthetic construct
  misc_feature 1..22: note = chemically synthesized
  source 1..22: mol_type = other DNA
cacagccctctgcttagtctgc

SEQ ID NO: 49452 - DNA, 22 bp, synthetic construct
  misc_feature 1..22: note = chemically synthesized
  source 1..22: mol_type = other DNA
tgcttagtctgccccccaggct

SEQ ID NO: 49453 - DNA, 22 bp, synthetic construct
  misc_feature 1..22: note = chemically synthesized
  source 1..22: mol_type = other DNA
cttagtctgccccccaggctgc

SEQ ID NO: 49454 - DNA, 22 bp, synthetic construct
  misc_feature 1..22: note = chemically synthesized
  source 1..22: mol_type = other DNA
agtctgccccccaggctgctca

SEQ ID NO: 49455 - DNA, 22 bp, synthetic construct
  misc_feature 1..22: note = chemically synthesized
  source 1..22: mol_type = other DNA
gtctgccccccaggctgctcag

SEQ ID NO: 49456 - DNA, 22 bp, synthetic construct
  misc_feature 1..22: note = chemically synthesized
  source 1..22: mol_type = other DNA
ccccccaggctgctcagagcag

SEQ ID NO: 49457 - DNA, 22 bp, synthetic construct
  misc_feature 1..22: note = chemically synthesized
  source 1..22: mol_type = other DNA
ctcagagcaggaggaggttcaa

SEQ ID NO: 49458 - DNA, 22 bp, synthetic construct
  misc_feature 1..22: note = chemically synthesized
  source 1..22: mol_type = other DNA
agagcaggaggaggttcaattt

SEQ ID NO: 49459 - DNA, 22 bp, synthetic construct
  misc_feature 1..22: note = chemically synthesized
  source 1..22: mol_type = other DNA
aattttgaccagcctcaggcct

SEQ ID NO: 49460 - DNA, 22 bp, synthetic construct
  misc_feature 1..22: note = chemically synthesized
  source 1..22: mol_type = other DNA
tgaccagcctcaggcctgtttc

SEQ ID NO: 49461 - DNA, 22 bp, synthetic construct
  misc_feature 1..22: note = chemically synthesized
  source 1..22: mol_type = other DNA
gaccagcctcaggcctgtttct

SEQ ID NO: 49462 - DNA, 22 bp, synthetic construct
  misc_feature 1..22: note = chemically synthesized
  source 1..22: mol_type = other DNA
accagcctcaggcctgtttctg

SEQ ID NO: 49463 - DNA, 22 bp, synthetic construct
  misc_feature 1..22: note = chemically synthesized
  source 1..22: mol_type = other DNA
aggcctgtttctgtttttgctc

SEQ ID NO: 49464 - DNA, 22 bp, synthetic construct
  misc_feature 1..22: note = chemically synthesized
  source 1..22: mol_type = other DNA
tttctgtttttgctcctggaaa

SEQ ID NO: 49465 - DNA, 22 bp, synthetic construct
  misc_feature 1..22: note = chemically synthesized
  source 1..22: mol_type = other DNA
ctgtttttgctcctggaaaacc

SEQ ID NO: 49466 - DNA, 22 bp, synthetic construct
  misc_feature 1..22: note = chemically synthesized
  source 1..22: mol_type = other DNA
tgtttttgctcctggaaaacca

SEQ ID NO: 49467 - DNA, 22 bp, synthetic construct
  misc_feature 1..22: note = chemically synthesized
  source 1..22: mol_type = other DNA
tttttgctcctggaaaaccagt

SEQ ID NO: 49468 - DNA, 22 bp, synthetic construct
  misc_feature 1..22: note = chemically synthesized
  source 1..22: mol_type = other DNA
ttgctcctggaaaaccagtgtg

SEQ ID NO: 49469 - DNA, 22 bp, synthetic construct
  misc_feature 1..22: note = chemically synthesized
  source 1..22: mol_type = other DNA
tgctcctggaaaaccagtgtga

SEQ ID NO: 49470 - DNA, 22 bp, synthetic construct
  misc_feature 1..22: note = chemically synthesized
  source 1..22: mol_type = other DNA
gctcctggaaaaccagtgtgat

SEQ ID NO: 49471 - DNA, 22 bp, synthetic construct
  misc_feature 1..22: note = chemically synthesized
  source 1..22: mol_type = other DNA
ctcctggaaaaccagtgtgatc

SEQ ID NO: 49472 - DNA, 22 bp, synthetic construct
  misc_feature 1..22: note = chemically synthesized
  source 1..22: mol_type = other DNA
ctggaaaaccagtgtgatccgt

SEQ ID NO: 49473 - DNA, 22 bp, synthetic construct
  misc_feature 1..22: note = chemically synthesized
  source 1..22: mol_type = other DNA
gaaaaccagtgtgatccgtata

SEQ ID NO: 49474 - DNA, 22 bp, synthetic construct
  misc_feature 1..22: note = chemically synthesized
  source 1..22: mol_type = other DNA
ggagtttctttggatacatggc

SEQ ID NO: 49475 - DNA, 22 bp, synthetic construct
  misc_feature 1..22: note = chemically synthesized
  source 1..22: mol_type = other DNA
gagtttctttggatacatggcc

SEQ ID NO: 49476 - DNA, 22 bp, synthetic construct
  misc_feature 1..22: note = chemically synthesized
  source 1..22: mol_type = other DNA
ctttggatacatggcccccact

SEQ ID NO: 49477 - DNA, 22 bp, synthetic construct
  misc_feature 1..22: note = chemically synthesized
  source 1..22: mol_type = other DNA
tttggatacatggcccccactc

SEQ ID NO: 49478 - DNA, 22 bp, synthetic construct
  misc_feature 1..22: note = chemically synthesized
  source 1..22: mol_type = other DNA
tggatacatggcccccactctg

SEQ ID NO: 49479 - DNA, 22 bp, synthetic construct
  misc_feature 1..22: note = chemically synthesized
  source 1..22: mol_type = other DNA
ggatacatggcccccactctgg

SEQ ID NO: 49480 - DNA, 22 bp, synthetic construct
  misc_feature 1..22: note = chemically synthesized
  source 1..22: mol_type = other DNA
gatacatggcccccactctggg

SEQ ID NO: 49481 - DNA, 22 bp, synthetic construct
  misc_feature 1..22: note = chemically synthesized
  source 1..22: mol_type = other DNA
tggggttgttggaggcctttgg

SEQ ID NO: 49482 - DNA, 22 bp, synthetic construct
  misc_feature 1..22: note = chemically synthesized
  source 1..22: mol_type = other DNA
gggttgttggaggcctttggag

SEQ ID NO: 49483 - DNA, 22 bp, synthetic construct
  misc_feature 1..22: note = chemically synthesized
  source 1..22: mol_type = other DNA
ttggaggcctttggagactgct

SEQ ID NO: 49484 - DNA, 22 bp, synthetic construct
  misc_feature 1..22: note = chemically synthesized
  source 1..22: mol_type = other DNA
gaggcctttggagactgctggg

SEQ ID NO: 49485 - DNA, 22 bp, synthetic construct
  misc_feature 1..22: note = chemically synthesized
  source 1..22: mol_type = other DNA
tggagactgctgggggtggagg

SEQ ID NO: 49486 - DNA, 22 bp, synthetic construct
  misc_feature 1..22: note = chemically synthesized
  source 1..22: mol_type = other DNA
ggagactgctgggggtggaggg

SEQ ID NO: 49487 - DNA, 22 bp, synthetic construct
  misc_feature 1..22: note = chemically synthesized
  source 1..22: mol_type = other DNA
gagactgctgggggtggagggg

SEQ ID NO: 49488 - DNA, 22 bp, synthetic construct
  misc_feature 1..22: note = chemically synthesized
  source 1..22: mol_type = other DNA
ctgggggtggaggggaggggag

SEQ ID NO: 49489 - DNA, 22 bp, synthetic construct
  misc_feature 1..22: note = chemically synthesized
  source 1..22: mol_type = other DNA
ggggtggaggggaggggaggta

SEQ ID NO: 49490 - DNA, 22 bp, synthetic construct
  misc_feature 1..22: note = chemically synthesized
  source 1..22: mol_type = other DNA
aggctagtggggccccacttga

SEQ ID NO: 49491 - DNA, 22 bp, synthetic construct
  misc_feature 1..22: note = chemically synthesized
  source 1..22: mol_type = other DNA
gtggggccccacttgattgcaa

SEQ ID NO: 49492 - DNA, 22 bp, synthetic construct
  misc_feature 1..22: note = chemically synthesized
  source 1..22: mol_type = other DNA
gattgcaatccctttaaaagcc

SEQ ID NO: 49493 - DNA, 22 bp, synthetic construct
  misc_feature 1..22: note = chemically synthesized
  source 1..22: mol_type = other DNA
attgcaatccctttaaaagcct

SEQ ID NO: 49494 - DNA, 22 bp, synthetic construct
  misc_feature 1..22: note = chemically synthesized
  source 1..22: mol_type = other DNA
caatccctttaaaagcctaaat

SEQ ID NO: 49495 - DNA, 22 bp, synthetic construct
  misc_feature 1..22: note = chemically synthesized
  source 1..22: mol_type = other DNA
taaaagcctaaatcagattgca

SEQ ID NO: 49496 - DNA, 22 bp, synthetic construct
  misc_feature 1..22: note = chemically synthesized
  source 1..22: mol_type = other DNA
aaaagcctaaatcagattgcat

SEQ ID NO: 49497 - DNA, 22 bp, synthetic construct
  misc_feature 1..22: note = chemically synthesized
  source 1..22: mol_type = other DNA
aaagcctaaatcagattgcatc

SEQ ID NO: 49498 - DNA, 22 bp, synthetic construct
  misc_feature 1..22: note = chemically synthesized
  source 1..22: mol_type = other DNA
aatcagattgcatcgcccgctg

SEQ ID NO: 49499 - DNA, 22 bp, synthetic construct
  misc_feature 1..22: note = chemically synthesized
  source 1..22: mol_type = other DNA
catcgcccgctgtgcaacccgc

SEQ ID NO: 49500 - DNA, 22 bp, synthetic construct
  misc_feature 1..22: note = chemically synthesized
  source 1..22: mol_type = other DNA
tgcaacccgcaaacctgcttgg

SEQ ID NO: 49501 - DNA, 22 bp, synthetic construct
  misc_feature 1..22: note = chemically synthesized
  source 1..22: mol_type = other DNA
cttgggagctggcgtacgtgcc

SEQ ID NO: 49502 - DNA, 22 bp, synthetic construct
  misc_feature 1..22: note = chemically synthesized
  source 1..22: mol_type = other DNA
gggagctggcgtacgtgccgta

SEQ ID NO: 49503 - DNA, 22 bp, synthetic construct
  misc_feature 1..22: note = chemically synthesized
  source 1..22: mol_type = other DNA
ggagctggcgtacgtgccgtag

SEQ ID NO: 49504 - DNA, 22 bp, synthetic construct
  misc_feature 1..22: note = chemically synthesized
  source 1..22: mol_type = other DNA
gcgtacgtgccgtagatacttg

SEQ ID NO: 49505 - DNA, 22 bp, synthetic construct
  misc_feature 1..22: note = chemically synthesized
  source 1..22: mol_type = other DNA
gcagagtgaatggatgagtgca

SEQ ID NO: 49506 - DNA, 22 bp, synthetic construct
  misc_feature 1..22: note = chemically synthesized
  source 1..22: mol_type = other DNA
cagagtgaatggatgagtgcat

SEQ ID NO: 49507 - DNA, 22 bp, synthetic construct
  misc_feature 1..22: note = chemically synthesized
  source 1..22: mol_type = other DNA
ttgccccttctgtcattcacca

SEQ ID NO: 49508 - DNA, 22 bp, synthetic construct
  misc_feature 1..22: note = chemically synthesized
  source 1..22: mol_type = other DNA
tgccccttctgtcattcaccag

SEQ ID NO: 49509 - DNA, 22 bp, synthetic construct
  misc_feature 1..22: note = chemically synthesized
  source 1..22: mol_type = other DNA
gccccttctgtcattcaccagt

SEQ ID NO: 49510 - DNA, 22 bp, synthetic construct
  misc_feature 1..22: note = chemically synthesized
  source 1..22: mol_type = other DNA
ccccttctgtcattcaccagtc

SEQ ID NO: 49511 - DNA, 22 bp, synthetic construct
  misc_feature 1..22: note = chemically synthesized
  source 1..22: mol_type = other DNA
ctgtcattcaccagtcccattt

SEQ ID NO: 49512 - DNA, 22 bp, synthetic construct
  misc_feature 1..22: note = chemically synthesized
  source 1..22: mol_type = other DNA
tgtcattcaccagtcccattta

SEQ ID NO: 49513 - DNA, 22 bp, synthetic construct
  misc_feature 1..22: note = chemically synthesized
  source 1..22: mol_type = other DNA
tcattcaccagtcccatttatg

SEQ ID NO: 49514 - DNA, 22 bp, synthetic construct
  misc_feature 1..22: note = chemically synthesized
  source 1..22: mol_type = other DNA
accagtcccatttatgcctcca

SEQ ID NO: 49515 - DNA, 22 bp, synthetic construct
  misc_feature 1..22: note = chemically synthesized
  source 1..22: mol_type = other DNA
atgcctccaccttggggctcta

SEQ ID NO: 49516 - DNA, 22 bp, synthetic construct
  misc_feature 1..22: note = chemically synthesized
  source 1..22: mol_type = other DNA
tgcctccaccttggggctctac

SEQ ID NO: 49517 - DNA, 22 bp, synthetic construct
  misc_feature 1..22: note = chemically synthesized
  source 1..22: mol_type = other DNA
caccttggggctctaccaggcg

SEQ ID NO: 49518 - DNA, 22 bp, synthetic construct
  misc_feature 1..22: note = chemically synthesized
  source 1..22: mol_type = other DNA
ggggctctaccaggcgagtgac

SEQ ID NO: 49519 - DNA, 22 bp, synthetic construct
  misc_feature 1..22: note = chemically synthesized
  source 1..22: mol_type = other DNA
gggctctaccaggcgagtgacc

SEQ ID NO: 49520 - DNA, 22 bp, synthetic construct
  misc_feature 1..22: note = chemically synthesized
  source 1..22: mol_type = other DNA
taccaggcgagtgacccacagg

SEQ ID NO: 49521 - DNA, 22 bp, synthetic construct
  misc_feature 1..22: note = chemically synthesized
  source 1..22: mol_type = other DNA
ccaggcgagtgacccacaggat

SEQ ID NO: 49522 - DNA, 22 bp, synthetic construct
  misc_feature 1..22: note = chemically synthesized
  source 1..22: mol_type = other DNA
cagcacacacattcagaccagg

SEQ ID NO: 49523 - DNA, 22 bp, synthetic construct
  misc_feature 1..22: note = chemically synthesized
  source 1..22: mol_type = other DNA
agaccagggaacccacttactg

SEQ ID NO: 49524 - DNA, 22 bp, synthetic construct
  misc_feature 1..22: note = chemically synthesized
  source 1..22: mol_type = other DNA
actggctgtgaggcctcaggtg

SEQ ID NO: 49525 - DNA, 22 bp, synthetic construct
  misc_feature 1..22: note = chemically synthesized
  source 1..22: mol_type = other DNA
ctggctgtgaggcctcaggtga

SEQ ID NO: 49526 - DNA, 22 bp, synthetic construct
  misc_feature 1..22: note = chemically synthesized
  source 1..22: mol_type = other DNA
gctgtgaggcctcaggtgagtt

SEQ ID NO: 49527 - DNA, 22 bp, synthetic construct
  misc_feature 1..22: note = chemically synthesized
  source 1..22: mol_type = other DNA
tgaggcctcaggtgagttgttt

SEQ ID NO: 49528 - DNA, 22 bp, synthetic construct
  misc_feature 1..22: note = chemically synthesized
  source 1..22: mol_type = other DNA
aggtgagttgtttaaccgctcc

SEQ ID NO: 49529 - DNA, 22 bp, synthetic construct
  misc_feature 1..22: note = chemically synthesized
  source 1..22: mol_type = other DNA
tttaaccgctccgagcctcaat

SEQ ID NO: 49530 - DNA, 22 bp, synthetic construct
  misc_feature 1..22: note = chemically synthesized
  source 1..22: mol_type = other DNA
aaccgctccgagcctcaatttc

SEQ ID NO: 49531 - DNA, 22 bp, synthetic construct
  misc_feature 1..22: note = chemically synthesized
  source 1..22: mol_type = other DNA
accgctccgagcctcaatttcc

SEQ ID NO: 49532 - DNA, 22 bp, synthetic construct
  misc_feature 1..22: note = chemically synthesized
  source 1..22: mol_type = other DNA
cgagcctcaatttccctatctg

SEQ ID NO: 49533 - DNA, 22 bp, synthetic construct
  misc_feature 1..22: note = chemically synthesized
  source 1..22: mol_type = other DNA
aatttccctatctgtaaaatgg

SEQ ID NO: 49534 - DNA, 22 bp, synthetic construct
  misc_feature 1..22: note = chemically synthesized
  source 1..22: mol_type = other DNA
ccctatctgtaaaatggggatg

SEQ ID NO: 49535 - DNA, 22 bp, synthetic construct
  misc_feature 1..22: note = chemically synthesized
  source 1..22: mol_type = other DNA
cctatctgtaaaatggggatgg

SEQ ID NO: 49536 - DNA, 22 bp, synthetic construct
  misc_feature 1..22: note = chemically synthesized
  source 1..22: mol_type = other DNA
tctgtaaaatggggatggtgac

SEQ ID NO: 49537 - DNA, 22 bp, synthetic construct
  misc_feature 1..22: note = chemically synthesized
  source 1..22: mol_type = other DNA
taaaatggggatggtgacggta

SEQ ID NO: 49538 - DNA, 22 bp, synthetic construct
  misc_feature 1..22: note = chemically synthesized
  source 1..22: mol_type = other DNA
gttgagctgctgtgaggattaa

SEQ ID NO: 49539 - DNA, 22 bp, synthetic construct
  misc_feature 1..22: note = chemically synthesized
  source 1..22: mol_type = other DNA
ttgagctgctgtgaggattaaa

SEQ ID NO: 49540 - DNA, 22 bp, synthetic construct
  misc_feature 1..22: note = chemically synthesized
  source 1..22: mol_type = other DNA
agctgctgtgaggattaaaatg

SEQ ID NO: 49541 - DNA, 22 bp, synthetic construct
  misc_feature 1..22: note = chemically synthesized
  source 1..22: mol_type = other DNA
ctgtgaggattaaaatgcaaca

SEQ ID NO: 49542 - DNA, 22 bp, synthetic construct
  misc_feature 1..22: note = chemically synthesized
  source 1..22: mol_type = other DNA
tgaggattaaaatgcaacagtt

SEQ ID NO: 49543 - DNA, 22 bp, synthetic construct
  misc_feature 1..22: note = chemically synthesized
  source 1..22: mol_type = other DNA
aaatgcaacagttcaaggaaag

SEQ ID NO: 49544 - DNA, 22 bp, synthetic construct
  misc_feature 1..22: note = chemically synthesized
  source 1..22: mol_type = other DNA
aaggaaagctcagagacgggta

SEQ ID NO: 49545 - DNA, 22 bp, synthetic construct
  misc_feature 1..22: note = chemically synthesized
  source 1..22: mol_type = other DNA
agagacgggtactgggtgtgcc

SEQ ID NO: 49546 - DNA, 22 bp, synthetic construct
  misc_feature 1..22: note = chemically synthesized
  source 1..22: mol_type = other DNA
ggtgtgcccagaaagcccctcc

SEQ ID NO: 49547 - DNA, 22 bp, synthetic construct
  misc_feature 1..22: note = chemically synthesized
  source 1..22: mol_type = other DNA
ctgatgctgccctccctccccc

SEQ ID NO: 49548 - DNA, 22 bp, synthetic construct
  misc_feature 1..22: note = chemically synthesized
  source 1..22: mol_type = other DNA
atgctgccctccctcccccgtg

SEQ ID NO: 49549 - DNA, 22 bp, synthetic construct
  misc_feature 1..22: note = chemically synthesized
  source 1..22: mol_type = other DNA
ccctccctcccccgtgtcaggg

SEQ ID NO: 49550 - DNA, 22 bp, synthetic construct
  misc_feature 1..22: note = chemically synthesized
  source 1..22: mol_type = other DNA
cctcccccgtgtcaggggctgg

SEQ ID NO: 49551 - DNA, 22 bp, synthetic construct
  misc_feature 1..22: note = chemically synthesized
  source 1..22: mol_type = other DNA
ccccgtgtcaggggctggtgtc

SEQ ID NO: 49552 - DNA, 22 bp, synthetic construct
  misc_feature 1..22: note = chemically synthesized
  source 1..22: mol_type = other DNA
gtgtcactggggtggggtgggc

SEQ ID NO: 49553 - DNA, 22 bp, synthetic construct
  misc_feature 1..22: note = chemically synthesized
  source 1..22: mol_type = other DNA
gggtggggtgggccacacttga

SEQ ID NO: 49554 - DNA, 22 bp, synthetic construct
  misc_feature 1..22: note = chemically synthesized
  source 1..22: mol_type = other DNA
gaagagctttcctccaggcagt

SEQ ID NO: 49555 - DNA, 22 bp, synthetic construct
  misc_feature 1..22: note = chemically synthesized
  source 1..22: mol_type = other DNA
aagagctttcctccaggcagtc

SEQ ID NO: 49556 - DNA, 22 bp, synthetic construct
  misc_feature 1..22: note = chemically synthesized
  source 1..22: mol_type = other DNA
tcctccaggcagtctctcattc

SEQ ID NO: 49557 - DNA, 22 bp, synthetic construct
  misc_feature 1..22: note = chemically synthesized
  source 1..22: mol_type = other DNA
cctccaggcagtctctcattca

SEQ ID NO: 49558 - DNA, 22 bp, synthetic construct
  misc_feature 1..22: note = chemically synthesized
  source 1..22: mol_type = other DNA
ctccaggcagtctctcattcag

SEQ ID NO: 49559 - DNA, 22 bp, synthetic construct
  misc_feature 1..22: note = chemically synthesized
  source 1..22: mol_type = other DNA
caggcagtctctcattcagtta

SEQ ID NO: 49560 - DNA, 22 bp, synthetic construct
  misc_feature 1..22: note = chemically synthesized
  source 1..22: mol_type = other DNA
tcattcagttaccctgtgaagg

SEQ ID NO: 49561 - DNA, 22 bp, synthetic construct
  misc_feature 1..22: note = chemically synthesized
  source 1..22: mol_type = other DNA
attcagttaccctgtgaaggga

SEQ ID NO: 49562 - DNA, 22 bp, synthetic construct
  misc_feature 1..22: note = chemically synthesized
  source 1..22: mol_type = other DNA
agttaccctgtgaagggagtag

SEQ ID NO: 49563 - DNA, 22 bp, synthetic construct
  misc_feature 1..22: note = chemically synthesized
  source 1..22: mol_type = other DNA
ccctgtgaagggagtaggtacc

SEQ ID NO: 49564 - DNA, 22 bp, synthetic construct
  misc_feature 1..22: note = chemically synthesized
  source 1..22: mol_type = other DNA
tgaagggagtaggtaccaccct

SEQ ID NO: 49565 - DNA, 22 bp, synthetic construct
  misc_feature 1..22: note = chemically synthesized
  source 1..22: mol_type = other DNA
ctttcaggcagcgggaaactga

SEQ ID NO: 49566 - DNA, 22 bp, synthetic construct
  misc_feature 1..22: note = chemically synthesized
  source 1..22: mol_type = other DNA
tcaggcagcgggaaactgagct

SEQ ID NO: 49567 - DNA, 22 bp, synthetic construct
  misc_feature 1..22: note = chemically synthesized
  source 1..22: mol_type = other DNA
caggcagcgggaaactgagctc

SEQ ID NO: 49568 - DNA, 22 bp, synthetic construct
  misc_feature 1..22: note = chemically synthesized
  source 1..22: mol_type = other DNA
aggcagcgggaaactgagctca

SEQ ID NO: 49569 - DNA, 22 bp, synthetic construct
  misc_feature 1..22: note = chemically synthesized
  source 1..22: mol_type = other DNA
agctcagactcccctccccttc

SEQ ID NO: 49570 - DNA, 22 bp, synthetic construct
  misc_feature 1..22: note = chemically synthesized
  source 1..22: mol_type = other DNA
agactcccctccccttctctct

SEQ ID NO: 49571 - DNA, 22 bp, synthetic construct
  misc_feature 1..22: note = chemically synthesized
  source 1..22: mol_type = other DNA
ccctccccttctctctgagctc

SEQ ID NO: 49572 - DNA, 22 bp, synthetic construct
  misc_feature 1..22: note = chemically synthesized
  source 1..22: mol_type = other DNA
cccttctctctgagctcccttc

SEQ ID NO: 49573 - DNA, 22 bp, synthetic construct
  misc_feature 1..22: note = chemically synthesized
  source 1..22: mol_type = other DNA
ctctctgagctcccttccctgc

SEQ ID NO: 49574 - DNA, 22 bp, synthetic construct
  misc_feature 1..22: note = chemically synthesized
  source 1..22: mol_type = other DNA
tctctgagctcccttccctgca

SEQ ID NO: 49575 - DNA, 22 bp, synthetic construct
  misc_feature 1..22: note = chemically synthesized
  source 1..22: mol_type = other DNA
tctgagctcccttccctgcagc

SEQ ID NO: 49576 - DNA, 22 bp, synthetic construct
  misc_feature 1..22: note = chemically synthesized
  source 1..22: mol_type = other DNA
tgagctcccttccctgcagctc

SEQ ID NO: 49577 - DNA, 22 bp, synthetic construct
  misc_feature 1..22: note = chemically synthesized
  source 1..22: mol_type = other DNA
agctcccttccctgcagctcca

SEQ ID NO: 49578 - DNA, 22 bp, synthetic construct
  misc_feature 1..22: note = chemically synthesized
  source 1..22: mol_type = other DNA
ccttccctgcagctccatcccc

SEQ ID NO: 49579 - DNA, 22 bp, synthetic construct
  misc_feature 1..22: note = chemically synthesized
  source 1..22: mol_type = other DNA
ccctgcagctccatcccctggc

SEQ ID NO: 49580 - DNA, 22 bp, synthetic construct
  misc_feature 1..22: note = chemically synthesized
  source 1..22: mol_type = other DNA
cctgcagctccatcccctggct

SEQ ID NO: 49581 - DNA, 22 bp, synthetic construct
  misc_feature 1..22: note = chemically synthesized
  source 1..22: mol_type = other DNA
cagctccatcccctggcttcag

SEQ ID NO: 49582 - DNA, 22 bp, synthetic construct
  misc_feature 1..22: note = chemically synthesized
  source 1..22: mol_type = other DNA
catcccctggcttcagggcccc

SEQ ID NO: 49583 - DNA, 22 bp, synthetic construct
  misc_feature 1..22: note = chemically synthesized
  source 1..22: mol_type = other DNA
gcttcagggcccctgtccttcc

SEQ ID NO: 49584 - DNA, 22 bp, synthetic construct
  misc_feature 1..22: note = chemically synthesized
  source 1..22: mol_type = other DNA
cagggcccctgtccttcccctg

SEQ ID NO: 49585 - DNA, 22 bp, synthetic construct
  misc_feature 1..22: note = chemically synthesized
  source 1..22: mol_type = other DNA
agggcccctgtccttcccctga

SEQ ID NO: 49586 - DNA, 22 bp, synthetic construct
  misc_feature 1..22: note = chemically synthesized
  source 1..22: mol_type = other DNA
tccttcccctgagctggctgaa

SEQ ID NO: 49587 - DNA, 22 bp, synthetic construct
  misc_feature 1..22: note = chemically synthesized
  source 1..22: mol_type = other DNA
cccctgagctggctgaatggat

SEQ ID NO: 49588 - DNA, 22 bp, synthetic construct
  misc_feature 1..22: note = chemically synthesized
  source 1..22: mol_type = other DNA
ccctgagctggctgaatggata

SEQ ID NO: 49589 - DNA, 22 bp, synthetic construct
  misc_feature 1..22: note = chemically synthesized
  source 1..22: mol_type = other DNA
agctggctgaatggatattccg

SEQ ID NO: 49590 - DNA, 22 bp, synthetic construct
  misc_feature 1..22: note = chemically synthesized
  source 1..22: mol_type = other DNA
gctgaatggatattccgctgct

SEQ ID NO: 49591 - DNA, 22 bp, synthetic construct
  misc_feature 1..22: note = chemically synthesized
  source 1..22: mol_type = other DNA
aatggatattccgctgctctac

SEQ ID NO: 49592 - DNA, 22 bp, synthetic construct
  misc_feature 1..22: note = chemically synthesized
  source 1..22: mol_type = other DNA
cgctgctctacatccactcaca

SEQ ID NO: 49593 - DNA, 22 bp, synthetic construct
  misc_feature 1..22: note = chemically synthesized
  source 1..22: mol_type = other DNA
ctctacatccactcacagctcc

SEQ ID NO: 49594 - DNA, 22 bp, synthetic construct
  misc_feature 1..22: note = chemically synthesized
  source 1..22: mol_type = other DNA
tacatccactcacagctccagc

SEQ ID NO: 49595 - DNA, 22 bp, synthetic construct
  misc_feature 1..22: note = chemically synthesized
  source 1..22: mol_type = other DNA
catccactcacagctccagcac

SEQ ID NO: 49596 - DNA, 22 bp, synthetic construct
  misc_feature 1..22: note = chemically synthesized
  source 1..22: mol_type = other DNA
acagctccagcactgggctgtg

SEQ ID NO: 49597 - DNA, 22 bp, synthetic construct
  misc_feature 1..22: note = chemically synthesized
  source 1..22: mol_type = other DNA
cagcactgggctgtggttgagg

SEQ ID NO: 49598 - DNA, 22 bp, synthetic construct
  misc_feature 1..22: note = chemically synthesized
  source 1..22: mol_type = other DNA
ggctgtggttgaggtcgcctgc

SEQ ID NO: 49599 - DNA, 22 bp, synthetic construct
  misc_feature 1..22: note = chemically synthesized
  source 1..22: mol_type = other DNA
tggttgaggtcgcctgccctcg

SEQ ID NO: 49600 - DNA, 22 bp, synthetic construct
  misc_feature 1..22: note = chemically synthesized
  source 1..22: mol_type = other DNA
aggtcgcctgccctcggtagct

SEQ ID NO: 49601 - DNA, 22 bp, synthetic construct
  misc_feature 1..22: note = chemically synthesized
  source 1..22: mol_type = other DNA
ccctcggtagctcctgggcatt

SEQ ID NO: 49602 - DNA, 22 bp, synthetic construct
  misc_feature 1..22: note = chemically synthesized
  source 1..22: mol_type = other DNA
ggtagctcctgggcatttcttc

SEQ ID NO: 49603 - DNA, 22 bp, synthetic construct
  misc_feature 1..22: note = chemically synthesized
  source 1..22: mol_type = other DNA
ctgggcatttcttcccctctct

SEQ ID NO: 49604 - DNA, 22 bp, synthetic construct
  misc_feature 1..22: note = chemically synthesized
  source 1..22: mol_type = other DNA
ggcatttcttcccctctctggg

SEQ ID NO: 49605 - DNA, 22 bp, synthetic construct
  misc_feature 1..22: note = chemically synthesized
  source 1..22: mol_type = other DNA
cttcccctctctgggcctttgt

SEQ ID NO: 49606 - DNA, 22 bp, synthetic construct
  misc_feature 1..22: note = chemically synthesized
  source 1..22: mol_type = other DNA
ttcccctctctgggcctttgtt

SEQ ID NO: 49607 - DNA, 22 bp, synthetic construct
  misc_feature 1..22: note = chemically synthesized
  source 1..22: mol_type = other DNA
cccctctctgggcctttgtttt

SEQ ID NO: 49608 - DNA, 22 bp, synthetic construct
  misc_feature 1..22: note = chemically synthesized
  source 1..22: mol_type = other DNA
ccctctctgggcctttgttttc

SEQ ID NO: 49609 - DNA, 22 bp, synthetic construct
  misc_feature 1..22: note = chemically synthesized
  source 1..22: mol_type = other DNA
tctgggcctttgttttcccatc

SEQ ID NO: 49610 - DNA, 22 bp, synthetic construct
  misc_feature 1..22: note = chemically synthesized
  source 1..22: mol_type = other DNA
tgggcctttgttttcccatctg

SEQ ID NO: 49611 - DNA, 22 bp, synthetic construct
  misc_feature 1..22: note = chemically synthesized
  source 1..22: mol_type = other DNA
ggcctttgttttcccatctgca

SEQ ID NO: 49612 - DNA, 22 bp, synthetic construct
  misc_feature 1..22: note = chemically synthesized
  source 1..22: mol_type = other DNA
tgttttcccatctgcacaatga

SEQ ID NO: 49613 - DNA, 22 bp, synthetic construct
  misc_feature 1..22: note = chemically synthesized
  source 1..22: mol_type = other DNA
gttttcccatctgcacaatgac

SEQ ID NO: 49614 - DNA, 22 bp, synthetic construct
  misc_feature 1..22: note = chemically synthesized
  source 1..22: mol_type = other DNA
ttttcccatctgcacaatgacc

SEQ ID NO: 49615 - DNA, 22 bp, synthetic construct
  misc_feature 1..22: note = chemically synthesized
  source 1..22: mol_type = other DNA
tcccatctgcacaatgaccccc

SEQ ID NO: 49616 - DNA, 22 bp, synthetic construct
  misc_feature 1..22: note = chemically synthesized
  source 1..22: mol_type = other DNA
cccatctgcacaatgaccccca

SEQ ID NO: 49617 - DNA, 22 bp, synthetic construct
  misc_feature 1..22: note = chemically synthesized
  source 1..22: mol_type = other DNA
ccatctgcacaatgacccccac

SEQ ID NO: 49618 - DNA, 22 bp, synthetic construct
  misc_feature 1..22: note = chemically synthesized
  source 1..22: mol_type = other DNA
cacaatgacccccactctaagc

SEQ ID NO: 49619 - DNA, 22 bp, synthetic construct
  misc_feature 1..22: note = chemically synthesized
  source 1..22: mol_type = other DNA
taagccctgctgtccctcccac

SEQ ID NO: 49620 - DNA, 22 bp, synthetic construct
  misc_feature 1..22: note = chemically synthesized
  source 1..22: mol_type = other DNA
agccctgctgtccctcccacct

SEQ ID NO: 49621 - DNA, 22 bp, synthetic construct
  misc_feature 1..22: note = chemically synthesized
  source 1..22: mol_type = other DNA
ctgtccctcccacctgtggaac

SEQ ID NO: 49622 - DNA, 22 bp, synthetic construct
  misc_feature 1..22: note = chemically synthesized
  source 1..22: mol_type = other DNA
tccctcccacctgtggaactga

SEQ ID NO: 49623 - DNA, 22 bp, synthetic construct
  misc_feature 1..22: note = chemically synthesized
  source 1..22: mol_type = other DNA
ccacctgtggaactgagtgagc

SEQ ID NO: 49624 - DNA, 22 bp, synthetic construct
  misc_feature 1..22: note = chemically synthesized
  source 1..22: mol_type = other DNA
tggaactgagtgagcagcagca

SEQ ID NO: 49625 - DNA, 22 bp, synthetic construct
  misc_feature 1..22: note = chemically synthesized
  source 1..22: mol_type = other DNA
agtgagcagcagcagcaatgtc

SEQ ID NO: 49626 - DNA, 22 bp, synthetic construct
  misc_feature 1..22: note = chemically synthesized
  source 1..22: mol_type = other DNA
tcctgctctcctcaagctctcc

SEQ ID NO: 49627 - DNA, 22 bp, synthetic construct
  misc_feature 1..22: note = chemically synthesized
  source 1..22: mol_type = other DNA
cctgctctcctcaagctctcct

SEQ ID NO: 49628 - DNA, 22 bp, synthetic construct
  misc_feature 1..22: note = chemically synthesized
  source 1..22: mol_type = other DNA
ctgctctcctcaagctctcctc

SEQ ID NO: 49629 - DNA, 22 bp, synthetic construct
  misc_feature 1..22: note = chemically synthesized
  source 1..22: mol_type = other DNA
ctctcctcaagctctcctcaag

SEQ ID NO: 49630 - DNA, 22 bp, synthetic construct
  misc_feature 1..22: note = chemically synthesized
  source 1..22: mol_type = other DNA
tcctcaagctctcctcaagctc

SEQ ID NO: 49631 - DNA, 22 bp, synthetic construct
  misc_feature 1..22: note = chemically synthesized
  source 1..22: mol_type = other DNA
ctcaagctctcctcaagctctg

SEQ ID NO: 49632 - DNA, 22 bp, synthetic construct
  misc_feature 1..22: note = chemically synthesized
  source 1..22: mol_type = other DNA
aagctctcctcaagctctgtct

SEQ ID NO: 49633 - DNA, 22 bp, synthetic construct
  misc_feature 1..22: note = chemically synthesized
  source 1..22: mol_type = other DNA
tcctcaagctctgtctcttctg

SEQ ID NO: 49634 - DNA, 22 bp, synthetic construct
  misc_feature 1..22: note = chemically synthesized
  source 1..22: mol_type = other DNA
ctcaagctctgtctcttctggc

SEQ ID NO: 49635 - DNA, 22 bp, synthetic construct
  misc_feature 1..22: note = chemically synthesized
  source 1..22: mol_type = other DNA
aagctctgtctcttctggcagg

SEQ ID NO: 49636 - DNA, 22 bp, synthetic construct
  misc_feature 1..22: note = chemically synthesized
  source 1..22: mol_type = other DNA
tgtctcttctggcaggcacagg

SEQ ID NO: 49637 - DNA, 22 bp, synthetic construct
  misc_feature 1..22: note = chemically synthesized
  source 1..22: mol_type = other DNA
tctcttctggcaggcacaggag

SEQ ID NO: 49638 - DNA, 22 bp, synthetic construct
  misc_feature 1..22: note = chemically synthesized
  source 1..22: mol_type = other DNA
ttctggcaggcacaggagagtg

SEQ ID NO: 49639 - DNA, 22 bp, synthetic construct
  misc_feature 1..22: note = chemically synthesized
  source 1..22: mol_type = other DNA
ctggcaggcacaggagagtggc

SEQ ID NO: 49640 - DNA, 22 bp, synthetic construct
  misc_feature 1..22: note = chemically synthesized
  source 1..22: mol_type = other DNA
tggcaggcacaggagagtggcc

SEQ ID NO: 49641 - DNA, 22 bp, synthetic construct
  misc_feature 1..22: note = chemically synthesized
  source 1..22: mol_type = other DNA
gcaggcacaggagagtggcctg

SEQ ID NO: 49642 - DNA, 22 bp, synthetic construct
  misc_feature 1..22: note = chemically synthesized
  source 1..22: mol_type = other DNA
aaggctggcaggaggttgccgc

SEQ ID NO: 49643 - DNA, 22 bp, synthetic construct
  misc_feature 1..22: note = chemically synthesized
  source 1..22: mol_type = other DNA
gcaggaggttgccgcccctcca

SEQ ID NO: 49644 - DNA, 22 bp, synthetic construct
  misc_feature 1..22: note = chemically synthesized
  source 1..22: mol_type = other DNA
ccgcccctccaacctggaattc

SEQ ID NO: 49645 - DNA, 22 bp, synthetic construct
  misc_feature 1..22: note = chemically synthesized
  source 1..22: mol_type = other DNA
caacctggaattcctggcagca

SEQ ID NO: 49646 - DNA, 22 bp, synthetic construct
  misc_feature 1..22: note = chemically synthesized
  source 1..22: mol_type = other DNA
gaattcctggcagcagcagcgg

SEQ ID NO: 49647 - DNA, 22 bp, synthetic construct
  misc_feature 1..22: note = chemically synthesized
  source 1..22: mol_type = other DNA
ctggcagcagcagcggctaggc

SEQ ID NO: 49648 - DNA, 22 bp, synthetic construct
  misc_feature 1..22: note = chemically synthesized
  source 1..22: mol_type = other DNA
gcagcagcagcggctaggcctt

SEQ ID NO: 49649 - DNA, 22 bp, synthetic construct
  misc_feature 1..22: note = chemically synthesized
  source 1..22: mol_type = other DNA
ggccttcctcggaggcccgacc

SEQ ID NO: 49650 - DNA, 22 bp, synthetic construct
  misc_feature 1..22: note = chemically synthesized
  source 1..22: mol_type = other DNA
cctcggaggcccgaccccctcc

SEQ ID NO: 49651 - DNA, 22 bp, synthetic construct
  misc_feature 1..22: note = chemically synthesized
  source 1..22: mol_type = other DNA
ctcggaggcccgaccccctcct

SEQ ID NO: 49652 - DNA, 22 bp, synthetic construct
  misc_feature 1..22: note = chemically synthesized
  source 1..22: mol_type = other DNA
ggaggcccgaccccctcctcct

SEQ ID NO: 49653 - DNA, 22 bp, synthetic construct
  misc_feature 1..22: note = chemically synthesized
  source 1..22: mol_type = other DNA
ctccttcttggttcagctcagg

SEQ ID NO: 49654 - DNA, 22 bp, synthetic construct
  misc_feature 1..22: note = chemically synthesized
  source 1..22: mol_type = other DNA
cttcttggttcagctcaggact

SEQ ID NO: 49655 - DNA, 22 bp, synthetic construct
  misc_feature 1..22: note = chemically synthesized
  source 1..22: mol_type = other DNA
cttggttcagctcaggactctg

SEQ ID NO: 49656 - DNA, 22 bp, synthetic construct
  misc_feature 1..22: note = chemically synthesized
  source 1..22: mol_type = other DNA
ttggttcagctcaggactctga

SEQ ID NO: 49657 - DNA, 22 bp, synthetic construct
  misc_feature 1..22: note = chemically synthesized
  source 1..22: mol_type = other DNA
ggttcagctcaggactctgagg

SEQ ID NO: 49658 - DNA, 22 bp, synthetic construct
  misc_feature 1..22: note = chemically synthesized
  source 1..22: mol_type = other DNA
gttcagctcaggactctgaggg

SEQ ID NO: 49659 - DNA, 22 bp, synthetic construct
  misc_feature 1..22: note = chemically synthesized
  source 1..22: mol_type = other DNA
agctcaggactctgagggttgc

SEQ ID NO: 49660 - DNA, 22 bp, synthetic construct
  misc_feature 1..22: note = chemically synthesized
  source 1..22: mol_type = other DNA
aggactctgagggttgctgcgt

SEQ ID NO: 49661 - DNA, 22 bp, synthetic construct
  misc_feature 1..22: note = chemically synthesized
  source 1..22: mol_type = other DNA
tgagggttgctgcgtggaggca

SEQ ID NO: 49662 - DNA, 22 bp, synthetic construct
  misc_feature 1..22: note = chemically synthesized
  source 1..22: mol_type = other DNA
agggttgctgcgtggaggcagt

SEQ ID NO: 49663 - DNA, 22 bp, synthetic construct
  misc_feature 1..22: note = chemically synthesized
  source 1..22: mol_type = other DNA
ctgcgtggaggcagtgcatgcc

SEQ ID NO: 49664 - DNA, 22 bp, synthetic construct
  misc_feature 1..22: note = chemically synthesized
  source 1..22: mol_type = other DNA
cgtggaggcagtgcatgccctg

SEQ ID NO: 49665 - DNA, 22 bp, synthetic construct
  misc_feature 1..22: note = chemically synthesized
  source 1..22: mol_type = other DNA
ggcacagtgcccagttcctgcc

SEQ ID NO: 49666 - DNA, 22 bp, synthetic construct
  misc_feature 1..22: note = chemically synthesized
  source 1..22: mol_type = other DNA
ctgcccacccaggaagtagact

SEQ ID NO: 49667 - DNA, 22 bp, synthetic construct
  misc_feature 1..22: note = chemically synthesized
  source 1..22: mol_type = other DNA
cccacccaggaagtagacttcg

SEQ ID NO: 49668 - DNA, 22 bp, synthetic construct
  misc_feature 1..22: note = chemically synthesized
  source 1..22: mol_type = other DNA
cgggtggaggcagtaggctggg

SEQ ID NO: 49669 - DNA, 22 bp, synthetic construct
  misc_feature 1..22: note = chemically synthesized
  source 1..22: mol_type = other DNA
gggtggaggcagtaggctgggg

SEQ ID NO: 49670 - DNA, 22 bp, synthetic construct
  misc_feature 1..22: note = chemically synthesized
  source 1..22: mol_type = other DNA
gggaggggcggggagcttggac

SEQ ID NO: 49671 - DNA, 22 bp, synthetic construct
  misc_feature 1..22: note = chemically synthesized
  source 1..22: mol_type = other DNA
ggacaggaaggagccttgctca

SEQ ID NO: 49672 - DNA, 22 bp, synthetic construct
  misc_feature 1..22: note = chemically synthesized
  source 1..22: mol_type = other DNA
gacaggaaggagccttgctcat

SEQ ID NO: 49673 - DNA, 22 bp, synthetic construct
  misc_feature 1..22: note = chemically synthesized
  source 1..22: mol_type = other DNA
gctcattgcccggcagacacaa

SEQ ID NO: 49674 - DNA, 22 bp, synthetic construct
  misc_feature 1..22: note = chemically synthesized
  source 1..22: mol_type = other DNA
ctcattgcccggcagacacaag

SEQ ID NO: 49675 - DNA, 22 bp, synthetic construct
  misc_feature 1..22: note = chemically synthesized
  source 1..22: mol_type = other DNA
attgcccggcagacacaagact

SEQ ID NO: 49676 - DNA, 22 bp, synthetic construct
  misc_feature 1..22: note = chemically synthesized
  source 1..22: mol_type = other DNA
cccggcagacacaagactgggc

SEQ ID NO: 49677 - DNA, 22 bp, synthetic construct
  misc_feature 1..22: note = chemically synthesized
  source 1..22: mol_type = other DNA
ggccctcataaactcagacagc

SEQ ID NO: 49678 - DNA, 22 bp, synthetic construct
  misc_feature 1..22: note = chemically synthesized
  source 1..22: mol_type = other DNA
ataaactcagacagcccggcat

SEQ ID NO: 49679 - DNA, 22 bp, synthetic construct
  misc_feature 1..22: note = chemically synthesized
  source 1..22: mol_type = other DNA
agacagcccggcatgtcacctg

SEQ ID NO: 49680 - DNA, 22 bp, synthetic construct
  misc_feature 1..22: note = chemically synthesized
  source 1..22: mol_type = other DNA
ttgtacctgccctttcagctct

SEQ ID NO: 49681 - DNA, 22 bp, synthetic construct
  misc_feature 1..22: note = chemically synthesized
  source 1..22: mol_type = other DNA
tacctgccctttcagctctgtg

SEQ ID NO: 49682 - DNA, 22 bp, synthetic construct
  misc_feature 1..22: note = chemically synthesized
  source 1..22: mol_type = other DNA
ccctttcagctctgtgacccgg

SEQ ID NO: 49683 - DNA, 22 bp, synthetic construct
  misc_feature 1..22: note = chemically synthesized
  source 1..22: mol_type = other DNA
tcagctctgtgacccgggacaa

SEQ ID NO: 49684 - DNA, 22 bp, synthetic construct
  misc_feature 1..22: note = chemically synthesized
  source 1..22: mol_type = other DNA
cagctctgtgacccgggacaag

SEQ ID NO: 49685 - DNA, 22 bp, synthetic construct
  misc_feature 1..22: note = chemically synthesized
  source 1..22: mol_type = other DNA
agctctgtgacccgggacaagt

SEQ ID NO: 49686 - DNA, 22 bp, synthetic construct
  misc_feature 1..22: note = chemically synthesized
  source 1..22: mol_type = other DNA
tgtgacccgggacaagtcaccc

SEQ ID NO: 49687 - DNA, 22 bp, synthetic construct
  misc_feature 1..22: note = chemically synthesized
  source 1..22: mol_type = other DNA
tgacccgggacaagtcaccctc

SEQ ID NO: 49688 - DNA, 22 bp, synthetic construct
  misc_feature 1..22: note = chemically synthesized
  source 1..22: mol_type = other DNA
tccctttgagttgccgcaagag

SEQ ID NO: 49689 - DNA, 22 bp, synthetic construct
  misc_feature 1..22: note = chemically synthesized
  source 1..22: mol_type = other DNA
cctttgagttgccgcaagaggt

SEQ ID NO: 49690 - DNA, 22 bp, synthetic construct
  misc_feature 1..22: note = chemically synthesized
  source 1..22: mol_type = other DNA
tgagttgccgcaagaggtacag

SEQ ID NO: 49691 - DNA, 22 bp, synthetic construct
  misc_feature 1..22: note = chemically synthesized
  source 1..22: mol_type = other DNA
gagttgccgcaagaggtacagt

SEQ ID NO: 49692 - DNA, 22 bp, synthetic construct
  misc_feature 1..22: note = chemically synthesized
  source 1..22: mol_type = other DNA
agttgccgcaagaggtacagtc

SEQ ID NO: 49693 - DNA, 22 bp, synthetic construct
  misc_feature 1..22: note = chemically synthesized
  source 1..22: mol_type = other DNA
ccgcaagaggtacagtcacact

SEQ ID NO: 49694 - DNA, 22 bp, synthetic construct
  misc_feature 1..22: note = chemically synthesized
  source 1..22: mol_type = other DNA
cccagaggattactagaaatga

SEQ ID NO: 49695 - DNA, 22 bp, synthetic construct
  misc_feature 1..22: note = chemically synthesized
  source 1..22: mol_type = other DNA
ctagaaatgacaggcctcgccc

SEQ ID NO: 49696 - DNA, 22 bp, synthetic construct
  misc_feature 1..22: note = chemically synthesized
  source 1..22: mol_type = other DNA
gaaatgacaggcctcgccctcc

SEQ ID NO: 49697 - DNA, 22 bp, synthetic construct
  misc_feature 1..22: note = chemically synthesized
  source 1..22: mol_type = other DNA
gccctcctggcacagacctggc

SEQ ID NO: 49698 - DNA, 22 bp, synthetic construct
  misc_feature 1..22: note = chemically synthesized
  source 1..22: mol_type = other DNA
ctggcacagacctggcaccaat

SEQ ID NO: 49699 - DNA, 22 bp, synthetic construct
  misc_feature 1..22: note = chemically synthesized
  source 1..22: mol_type = other DNA
gcacagacctggcaccaataac

SEQ ID NO: 49700 - DNA, 22 bp, synthetic construct
  misc_feature 1..22: note = chemically synthesized
  source 1..22: mol_type = other DNA
gcaccaataactggcaggtttc

SEQ ID NO: 49701 - DNA, 22 bp, synthetic construct
  misc_feature 1..22: note = chemically synthesized
  source 1..22: mol_type = other DNA
gcaggtttctggggccagctgc

SEQ ID NO: 49702 - DNA, 22 bp, synthetic construct
  misc_feature 1..22: note = chemically synthesized
  source 1..22: mol_type = other DNA
ctggggccagctgcagagggaa

SEQ ID NO: 49703 - DNA, 22 bp, synthetic construct
  misc_feature 1..22: note = chemically synthesized
  source 1..22: mol_type = other DNA
tggggccagctgcagagggaag

SEQ ID NO: 49704 - DNA, 22 bp, synthetic construct
  misc_feature 1..22: note = chemically synthesized
  source 1..22: mol_type = other DNA
gggccagctgcagagggaagag

SEQ ID NO: 49705 - DNA, 22 bp, synthetic construct
  misc_feature 1..22: note = chemically synthesized
  source 1..22: mol_type = other DNA
cagagggaagaggactgagcca

SEQ ID NO: 49706 - DNA, 22 bp, synthetic construct
  misc_feature 1..22: note = chemically synthesized
  source 1..22: mol_type = other DNA
agccacctatgaaatgcccagt

SEQ ID NO: 49707 - DNA, 22 bp, synthetic construct
  misc_feature 1..22: note = chemically synthesized
  source 1..22: mol_type = other DNA
tgaaatgcccagtgggcagccc

SEQ ID NO: 49708 - DNA, 22 bp, synthetic construct
  misc_feature 1..22: note = chemically synthesized
  source 1..22: mol_type = other DNA
ggcaggtctgtgtgcactgggg

SEQ ID NO: 49709 - DNA, 22 bp, synthetic construct
  misc_feature 1..22: note = chemically synthesized
  source 1..22: mol_type = other DNA
tgtgcactggggaggtgtgtgt

SEQ ID NO: 49710 - DNA, 22 bp, synthetic construct
  misc_feature 1..22: note = chemically synthesized
  source 1..22: mol_type = other DNA
gggaggtgtgtgtcataggacc

SEQ ID NO: 49711 - DNA, 22 bp, synthetic construct
  misc_feature 1..22: note = chemically synthesized
  source 1..22: mol_type = other DNA
tgacacacacctccccagtgca

SEQ ID NO: 49712 - DNA, 22 bp, synthetic construct
  misc_feature 1..22: note = chemically synthesized
  source 1..22: mol_type = other DNA
cccagtgcacacagacctgccc

SEQ ID NO: 49713 - DNA, 22 bp, synthetic construct
  misc_feature 1..22: note = chemically synthesized
  source 1..22: mol_type = other DNA
cccaactgtggggctgcccact

SEQ ID NO: 49714 - DNA, 22 bp, synthetic construct
  misc_feature 1..22: note = chemically synthesized
  source 1..22: mol_type = other DNA
tggggctgcccactgggcattt

SEQ ID NO: 49715 - DNA, 22 bp, synthetic construct
  misc_feature 1..22: note = chemically synthesized
  source 1..22: mol_type = other DNA
cccactgggcatttcataggtg

SEQ ID NO: 49716 - DNA, 22 bp, synthetic construct
  misc_feature 1..22: note = chemically synthesized
  source 1..22: mol_type = other DNA
ggcatttcataggtggctcagt

SEQ ID NO: 49717 - DNA, 22 bp, synthetic construct
  misc_feature 1..22: note = chemically synthesized
  source 1..22: mol_type = other DNA
cataggtggctcagtcctcttc

SEQ ID NO: 49718 - DNA, 22 bp, synthetic construct
  misc_feature 1..22: note = chemically synthesized
  source 1..22: mol_type = other DNA
ataggtggctcagtcctcttcc

SEQ ID NO: 49719 - DNA, 22 bp, synthetic construct
  misc_feature 1..22: note = chemically synthesized
  source 1..22: mol_type = other DNA
agtcctcttccctctgcagctg

SEQ ID NO: 49720 - DNA, 22 bp, synthetic construct
  misc_feature 1..22: note = chemically synthesized
  source 1..22: mol_type = other DNA
ttccctctgcagctggccccag

SEQ ID NO: 49721 - DNA, 22 bp, synthetic construct
  misc_feature 1..22: note = chemically synthesized
  source 1..22: mol_type = other DNA
ccctctgcagctggccccagaa

SEQ ID NO: 49722 - DNA, 22 bp, synthetic construct
  misc_feature 1..22: note = chemically synthesized
  source 1..22: mol_type = other DNA
cctctgcagctggccccagaaa

SEQ ID NO: 49723 - DNA, 22 bp, synthetic construct
  misc_feature 1..22: note = chemically synthesized
  source 1..22: mol_type = other DNA
tgcagctggccccagaaacctg

SEQ ID NO: 49724 - DNA, 22 bp, synthetic construct
  misc_feature 1..22: note = chemically synthesized
  source 1..22: mol_type = other DNA
cagctggccccagaaacctgcc

SEQ ID NO: 49725 - DNA, 22 bp, synthetic construct
  misc_feature 1..22: note = chemically synthesized
  source 1..22: mol_type = other DNA
gccccagaaacctgccagttat

SEQ ID NO: 49726 - DNA, 22 bp, synthetic construct
  misc_feature 1..22: note = chemically synthesized
  source 1..22: mol_type = other DNA
ccagttattggtgccaggtctg

SEQ ID NO: 49727 - DNA, 22 bp, synthetic construct
  misc_feature 1..22: note = chemically synthesized
  source 1..22: mol_type = other DNA
ttggtgccaggtctgtgccagg

SEQ ID NO: 49728 - DNA, 22 bp, synthetic construct
  misc_feature 1..22: note = chemically synthesized
  source 1..22: mol_type = other DNA
gtgccaggtctgtgccaggagg

SEQ ID NO: 49729 - DNA, 22 bp, synthetic construct
  misc_feature 1..22: note = chemically synthesized
  source 1..22: mol_type = other DNA
tgccaggagggcgaggcctgtc

SEQ ID NO: 49730 - DNA, 22 bp, synthetic construct
  misc_feature 1..22: note = chemically synthesized
  source 1..22: mol_type = other DNA
tcatttctagtaatcctctggg

SEQ ID NO: 49731 - DNA, 22 bp, synthetic construct
  misc_feature 1..22: note = chemically synthesized
  source 1..22: mol_type = other DNA
ctagtaatcctctgggcagtgt

SEQ ID NO: 49732 - DNA, 22 bp, synthetic construct
  misc_feature 1..22: note = chemically synthesized
  source 1..22: mol_type = other DNA
tagtaatcctctgggcagtgtg

SEQ ID NO: 49733 - DNA, 22 bp, synthetic construct
  misc_feature 1..22: note = chemically synthesized
  source 1..22: mol_type = other DNA
gtaatcctctgggcagtgtgac

SEQ ID NO: 49734 - DNA, 22 bp, synthetic construct
  misc_feature 1..22: note = chemically synthesized
  source 1..22: mol_type = other DNA
tgggcagtgtgactgtacctct

SEQ ID NO: 49735 - DNA, 22 bp, synthetic construct
  misc_feature 1..22: note = chemically synthesized
  source 1..22: mol_type = other DNA
ggcagtgtgactgtacctcttg

SEQ ID NO: 49736 - DNA, 22 bp, synthetic construct
  misc_feature 1..22: note = chemically synthesized
  source 1..22: mol_type = other DNA
tacctcttgcggcaactcaaag

SEQ ID NO: 49737 - DNA, 22 bp, synthetic construct
  misc_feature 1..22: note = chemically synthesized
  source 1..22: mol_type = other DNA
ttgcggcaactcaaagggagag

SEQ ID NO: 49738 - DNA, 22 bp, synthetic construct
  misc_feature 1..22: note = chemically synthesized
  source 1..22: mol_type = other DNA
gcggcaactcaaagggagaggg

SEQ ID NO: 49739 - DNA, 22 bp, synthetic construct
  misc_feature 1..22: note = chemically synthesized
  source 1..22: mol_type = other DNA
cggcaactcaaagggagagggt

SEQ ID NO: 49740 - DNA, 22 bp, synthetic construct
  misc_feature 1..22: note = chemically synthesized
  source 1..22: mol_type = other DNA
aaagggagagggtgacttgtcc

SEQ ID NO: 49741 - DNA, 22 bp, synthetic construct
  misc_feature 1..22: note = chemically synthesized
  source 1..22: mol_type = other DNA
gtcccgggtcacagagctgaaa

SEQ ID NO: 49742 - DNA, 22 bp, synthetic construct
  misc_feature 1..22: note = chemically synthesized
  source 1..22: mol_type = other DNA
tcccgggtcacagagctgaaag

SEQ ID NO: 49743 - DNA, 22 bp, synthetic construct
  misc_feature 1..22: note = chemically synthesized
  source 1..22: mol_type = other DNA
aaagggcaggtacaacaggtga

SEQ ID NO: 49744 - DNA, 22 bp, synthetic construct
  misc_feature 1..22: note = chemically synthesized
  source 1..22: mol_type = other DNA
tctgagtttatgagggcccagt

SEQ ID NO: 49745 - DNA, 22 bp, synthetic construct
  misc_feature 1..22: note = chemically synthesized
  source 1..22: mol_type = other DNA
agtttatgagggcccagtcttg

SEQ ID NO: 49746 - DNA, 22 bp, synthetic construct
  misc_feature 1..22: note = chemically synthesized
  source 1..22: mol_type = other DNA
atgagggcccagtcttgtgtct

SEQ ID NO: 49747 - DNA, 22 bp, synthetic construct
  misc_feature 1..22: note = chemically synthesized
  source 1..22: mol_type = other DNA
tgagggcccagtcttgtgtctg

SEQ ID NO: 49748 - DNA, 22 bp, synthetic construct
  misc_feature 1..22: note = chemically synthesized
  source 1..22: mol_type = other DNA
gtgtctgccgggcaatgagcaa

SEQ ID NO: 49749 - DNA, 22 bp, synthetic construct
  misc_feature 1..22: note = chemically synthesized
  source 1..22: mol_type = other DNA
tgtctgccgggcaatgagcaag

SEQ ID NO: 49750 - DNA, 22 bp, synthetic construct
  misc_feature 1..22: note = chemically synthesized
  source 1..22: mol_type = other DNA
ccgggcaatgagcaaggctcct

SEQ ID NO: 49751 - DNA, 22 bp, synthetic construct
  misc_feature 1..22: note = chemically synthesized
  source 1..22: mol_type = other DNA
cttcctgtccaagctccccgcc

SEQ ID NO: 49752 - DNA, 22 bp, synthetic construct
  misc_feature 1..22: note = chemically synthesized
  source 1..22: mol_type = other DNA
cctgtccaagctccccgcccct

SEQ ID NO: 49753 - DNA, 22 bp, synthetic construct
  misc_feature 1..22: note = chemically synthesized
  source 1..22: mol_type = other DNA
ctgtccaagctccccgcccctc

SEQ ID NO: 49754 - DNA, 22 bp, synthetic construct
  misc_feature 1..22: note = chemically synthesized
  source 1..22: mol_type = other DNA
tccaagctccccgcccctcccc

SEQ ID NO: 49755 - DNA, 22 bp, synthetic construct
  misc_feature 1..22: note = chemically synthesized
  source 1..22: mol_type = other DNA
cccgcccctccccagcctactg

SEQ ID NO: 49756 - DNA, 22 bp, synthetic construct
  misc_feature 1..22: note = chemically synthesized
  source 1..22: mol_type = other DNA
cccagcctactgcctccacccg

SEQ ID NO: 49757 - DNA, 22 bp, synthetic construct
  misc_feature 1..22: note = chemically synthesized
  source 1..22: mol_type = other DNA
ctgcctccacccgaagtctact

SEQ ID NO: 49758 - DNA, 22 bp, synthetic construct
  misc_feature 1..22: note = chemically synthesized
  source 1..22: mol_type = other DNA
cctccacccgaagtctacttcc

SEQ ID NO: 49759 - DNA, 22 bp, synthetic construct
  misc_feature 1..22: note = chemically synthesized
  source 1..22: mol_type = other DNA
cacccgaagtctacttcctggg

SEQ ID NO: 49760 - DNA, 22 bp, synthetic construct
  misc_feature 1..22: note = chemically synthesized
  source 1..22: mol_type = other DNA
cttcctgggtgggcaggaactg

SEQ ID NO: 49761 - DNA, 22 bp, synthetic construct
  misc_feature 1..22: note = chemically synthesized
  source 1..22: mol_type = other DNA
cctgggtgggcaggaactgggc

SEQ ID NO: 49762 - DNA, 22 bp, synthetic construct
  misc_feature 1..22: note = chemically synthesized
  source 1..22: mol_type = other DNA
ctgggtgggcaggaactgggca

SEQ ID NO: 49763 - DNA, 22 bp, synthetic construct
  misc_feature 1..22: note = chemically synthesized
  source 1..22: mol_type = other DNA
ggtgggcaggaactgggcactg

SEQ ID NO: 49764 - DNA, 22 bp, synthetic construct
  misc_feature 1..22: note = chemically synthesized
  source 1..22: mol_type = other DNA
ggcactgtgcccagggcatgca

SEQ ID NO: 49765 - DNA, 22 bp, synthetic construct
  misc_feature 1..22: note = chemically synthesized
  source 1..22: mol_type = other DNA
tgcccagggcatgcactgcctc

SEQ ID NO: 49766 - DNA, 22 bp, synthetic construct
  misc_feature 1..22: note = chemically synthesized
  source 1..22: mol_type = other DNA
cctccacgcagcaaccctcaga

SEQ ID NO: 49767 - DNA, 22 bp, synthetic construct
  misc_feature 1..22: note = chemically synthesized
  source 1..22: mol_type = other DNA
cacgcagcaaccctcagagtcc

SEQ ID NO: 49768 - DNA, 22 bp, synthetic construct
  misc_feature 1..22: note = chemically synthesized
  source 1..22: mol_type = other DNA
agagtcctgagctgaaccaaga

SEQ ID NO: 49769 - DNA, 22 bp, synthetic construct
  misc_feature 1..22: note = chemically synthesized
  source 1..22: mol_type = other DNA
agctgaaccaagaaggaggagg

SEQ ID NO: 49770 - DNA, 22 bp, synthetic construct
  misc_feature 1..22: note = chemically synthesized
  source 1..22: mol_type = other DNA
aaccaagaaggaggagggggtc

SEQ ID NO: 49771 - DNA, 22 bp, synthetic construct
  misc_feature 1..22: note = chemically synthesized
  source 1..22: mol_type = other DNA
cgaggaaggcctagccgctgct

SEQ ID NO: 49772 - DNA, 22 bp, synthetic construct
  misc_feature 1..22: note = chemically synthesized
  source 1..22: mol_type = other DNA
gccgctgctgctgccaggaatt

SEQ ID NO: 49773 - DNA, 22 bp, synthetic construct
  misc_feature 1..22: note = chemically synthesized
  source 1..22: mol_type = other DNA
ctgctgccaggaattccaggtt

SEQ ID NO: 49774 - DNA, 22 bp, synthetic construct
  misc_feature 1..22: note = chemically synthesized
  source 1..22: mol_type = other DNA
ctgccaggaattccaggttgga

SEQ ID NO: 49775 - DNA, 22 bp, synthetic construct
  misc_feature 1..22: note = chemically synthesized
  source 1..22: mol_type = other DNA
ccaggaattccaggttggaggg

SEQ ID NO: 49776 - DNA, 22 bp, synthetic construct
  misc_feature 1..22: note = chemically synthesized
  source 1..22: mol_type = other DNA
caggttggaggggcggcaacct

SEQ ID NO: 49777 - DNA, 22 bp, synthetic construct
  misc_feature 1..22: note = chemically synthesized
  source 1..22: mol_type = other DNA
gaggggcggcaacctcctgcca

SEQ ID NO: 49778 - DNA, 22 bp, synthetic construct
  misc_feature 1..22: note = chemically synthesized
  source 1..22: mol_type = other DNA
ctgccagccttcaggccactct

SEQ ID NO: 49779 - DNA, 22 bp, synthetic construct
  misc_feature 1..22: note = chemically synthesized
  source 1..22: mol_type = other DNA
ccagccttcaggccactctcct

SEQ ID NO: 49780 - DNA, 22 bp, synthetic construct
  misc_feature 1..22: note = chemically synthesized
  source 1..22: mol_type = other DNA
caggccactctcctgtgcctgc

SEQ ID NO: 49781 - DNA, 22 bp, synthetic construct
  misc_feature 1..22: note = chemically synthesized
  source 1..22: mol_type = other DNA
aggccactctcctgtgcctgcc

SEQ ID NO: 49782 - DNA, 22 bp, synthetic construct
  misc_feature 1..22: note = chemically synthesized
  source 1..22: mol_type = other DNA
tcctgtgcctgccagaagagac

SEQ ID NO: 49783 - DNA, 22 bp, synthetic construct
  misc_feature 1..22: note = chemically synthesized
  source 1..22: mol_type = other DNA
ctgtgcctgccagaagagacag

SEQ ID NO: 49784 - DNA, 22 bp, synthetic construct
  misc_feature 1..22: note = chemically synthesized
  source 1..22: mol_type = other DNA
tgcctgccagaagagacagagc

SEQ ID NO: 49785 - DNA, 22 bp, synthetic construct
  misc_feature 1..22: note = chemically synthesized
  source 1..22: mol_type = other DNA
ccagaagagacagagcttgagg

SEQ ID NO: 49786 - DNA, 22 bp, synthetic construct
  misc_feature 1..22: note = chemically synthesized
  source 1..22: mol_type = other DNA
gaggagagcttgaggagagcag

SEQ ID NO: 49787 - DNA, 22 bp, synthetic construct
  misc_feature 1..22: note = chemically synthesized
  source 1..22: mol_type = other DNA
aggagagcttgaggagagcagg

SEQ ID NO: 49788 - DNA, 22 bp, synthetic construct
  misc_feature 1..22: note = chemically synthesized
  source 1..22: mol_type = other DNA
gaggagagcaggaaaggtggga

SEQ ID NO: 49789 - DNA, 22 bp, synthetic construct
  misc_feature 1..22: note = chemically synthesized
  source 1..22: mol_type = other DNA
aggagagcaggaaaggtgggac

SEQ ID NO: 49790 - DNA, 22 bp, synthetic construct
  misc_feature 1..22: note = chemically synthesized
  source 1..22: mol_type = other DNA
ctgctgctgctcactcagttcc

SEQ ID NO: 49791 - DNA, 22 bp, synthetic construct
  misc_feature 1..22: note = chemically synthesized
  source 1..22: mol_type = other DNA
ctgctgctcactcagttccaca

SEQ ID NO: 49792 - DNA, 22 bp, synthetic construct
  misc_feature 1..22: note = chemically synthesized
  source 1..22: mol_type = other DNA
ctgctcactcagttccacaggt

SEQ ID NO: 49793 - DNA, 22 bp, synthetic construct
  misc_feature 1..22: note = chemically synthesized
  source 1..22: mol_type = other DNA
ctcactcagttccacaggtggg

SEQ ID NO: 49794 - DNA, 22 bp, synthetic construct
  misc_feature 1..22: note = chemically synthesized
  source 1..22: mol_type = other DNA
actcagttccacaggtgggagg

SEQ ID NO: 49795 - DNA, 22 bp, synthetic construct
  misc_feature 1..22: note = chemically synthesized
  source 1..22: mol_type = other DNA
agttccacaggtgggagggaca

SEQ ID NO: 49796 - DNA, 22 bp, synthetic construct
  misc_feature 1..22: note = chemically synthesized
  source 1..22: mol_type = other DNA
cacaggtgggagggacagcagg

SEQ ID NO: 49797 - DNA, 22 bp, synthetic construct
  misc_feature 1..22: note = chemically synthesized
  source 1..22: mol_type = other DNA
agagtgggggtcattgtgcaga

SEQ ID NO: 49798 - DNA, 22 bp, synthetic construct
  misc_feature 1..22: note = chemically synthesized
  source 1..22: mol_type = other DNA
gagtgggggtcattgtgcagat

SEQ ID NO: 49799 - DNA, 22 bp, synthetic construct
  misc_feature 1..22: note = chemically synthesized
  source 1..22: mol_type = other DNA
tgcagatgggaaaacaaaggcc

SEQ ID NO: 49800 - DNA, 22 bp, synthetic construct
  misc_feature 1..22: note = chemically synthesized
  source 1..22: mol_type = other DNA
ccgagggcaggcgacctcaacc

SEQ ID NO: 49801 - DNA, 22 bp, synthetic construct
  misc_feature 1..22: note = chemically synthesized
  source 1..22: mol_type = other DNA
aaccacagcccagtgctggagc

SEQ ID NO: 49802 - DNA, 22 bp, synthetic construct
  misc_feature 1..22: note = chemically synthesized
  source 1..22: mol_type = other DNA
gagctgtgagtggatgtagagc

SEQ ID NO: 49803 - DNA, 22 bp, synthetic construct
  misc_feature 1..22: note = chemically synthesized
  source 1..22: mol_type = other DNA
tgagtggatgtagagcagcgga

SEQ ID NO: 49804 - DNA, 22 bp, synthetic construct
  misc_feature 1..22: note = chemically synthesized
  source 1..22: mol_type = other DNA
agccagctcaggggaaggacag

SEQ ID NO: 49805 - DNA, 22 bp, synthetic construct
  misc_feature 1..22: note = chemically synthesized
  source 1..22: mol_type = other DNA
aggggaaggacaggggccctga

SEQ ID NO: 49806 - DNA, 22 bp, synthetic construct
  misc_feature 1..22: note = chemically synthesized
  source 1..22: mol_type = other DNA
aagccaggggatggagctgcag

SEQ ID NO: 49807 - DNA, 22 bp, synthetic construct
  misc_feature 1..22: note = chemically synthesized
  source 1..22: mol_type = other DNA
cagggaagggagctcagagaga

SEQ ID NO: 49808 - DNA, 22 bp, synthetic construct
  misc_feature 1..22: note = chemically synthesized
  source 1..22: mol_type = other DNA
agagagaaggggaggggagtct

SEQ ID NO: 49809 - DNA, 22 bp, synthetic construct
  misc_feature 1..22: note = chemically synthesized
  source 1..22: mol_type = other DNA
agctcagtttcccgctgcctga

SEQ ID NO: 49810 - DNA, 22 bp, synthetic construct
  misc_feature 1..22: note = chemically synthesized
  source 1..22: mol_type = other DNA
agtttcccgctgcctgaaagga

SEQ ID NO: 49811 - DNA, 22 bp, synthetic construct
  misc_feature 1..22: note = chemically synthesized
  source 1..22: mol_type = other DNA
cccgctgcctgaaaggagggtg

SEQ ID NO: 49812 - DNA, 22 bp, synthetic construct
  misc_feature 1..22: note = chemically synthesized
  source 1..22: mol_type = other DNA
ccgctgcctgaaaggagggtgg

SEQ ID NO: 49813 - DNA, 22 bp, synthetic construct
  misc_feature 1..22: note = chemically synthesized
  source 1..22: mol_type = other DNA
cctgaaaggagggtggtaccta

SEQ ID NO: 49814 - DNA, 22 bp, synthetic construct
  misc_feature 1..22: note = chemically synthesized
  source 1..22: mol_type = other DNA
aaaggagggtggtacctactcc

SEQ ID NO: 49815 - DNA, 22 bp, synthetic construct
  misc_feature 1..22: note = chemically synthesized
  source 1..22: mol_type = other DNA
ctcccttcacagggtaactgaa

SEQ ID NO: 49816 - DNA, 22 bp, synthetic construct
  misc_feature 1..22: note = chemically synthesized
  source 1..22: mol_type = other DNA
ccttcacagggtaactgaatga

SEQ ID NO: 49817 - DNA, 22 bp, synthetic construct
  misc_feature 1..22: note = chemically synthesized
  source 1..22: mol_type = other DNA
cacagggtaactgaatgagaga

SEQ ID NO: 49818 - DNA, 22 bp, synthetic construct
  misc_feature 1..22: note = chemically synthesized
  source 1..22: mol_type = other DNA
acagggtaactgaatgagagac

SEQ ID NO: 49819 - DNA, 22 bp, synthetic construct
  misc_feature 1..22: note = chemically synthesized
  source 1..22: mol_type = other DNA
aatgagagactgcctggaggaa

SEQ ID NO: 49820 - DNA, 22 bp, synthetic construct
  misc_feature 1..22: note = chemically synthesized
  source 1..22: mol_type = other DNA
cctggaggaaagctcttcaagt

SEQ ID NO: 49821 - DNA, 22 bp, synthetic construct
  misc_feature 1..22: note = chemically synthesized
  source 1..22: mol_type = other DNA
gaggaaagctcttcaagtgtgg

SEQ ID NO: 49822 - DNA, 22 bp, synthetic construct
  misc_feature 1..22: note = chemically synthesized
  source 1..22: mol_type = other DNA
ttcaagtgtggcccaccccacc

SEQ ID NO: 49823 - DNA, 22 bp, synthetic construct
  misc_feature 1..22: note = chemically synthesized
  source 1..22: mol_type = other DNA
caagtgtggcccaccccacccc

SEQ ID NO: 49824 - DNA, 22 bp, synthetic construct
  misc_feature 1..22: note = chemically synthesized
  source 1..22: mol_type = other DNA
aagtgtggcccaccccacccca

SEQ ID NO: 49825 - DNA, 22 bp, synthetic construct
  misc_feature 1..22: note = chemically synthesized
  source 1..22: mol_type = other DNA
acacgggggagggagggcagca

SEQ ID NO: 49826 - DNA, 22 bp, synthetic construct
  misc_feature 1..22: note = chemically synthesized
  source 1..22: mol_type = other DNA
tctgggcacacccagtacccgt

SEQ ID NO: 49827 - DNA, 22 bp, synthetic construct
  misc_feature 1..22: note = chemically synthesized
  source 1..22: mol_type = other DNA
ctgggcacacccagtacccgtc

SEQ ID NO: 49828 - DNA, 22 bp, synthetic construct
  misc_feature 1..22: note = chemically synthesized
  source 1..22: mol_type = other DNA
tgggcacacccagtacccgtct

SEQ ID NO: 49829 - DNA, 22 bp, synthetic construct
  misc_feature 1..22: note = chemically synthesized
  source 1..22: mol_type = other DNA
ggcacacccagtacccgtctct

SEQ ID NO: 49830 - DNA, 22 bp, synthetic construct
  misc_feature 1..22: note = chemically synthesized
  source 1..22: mol_type = other DNA
tgagctttccttgaactgttgc

SEQ ID NO: 49831 - DNA, 22 bp, synthetic construct
  misc_feature 1..22: note = chemically synthesized
  source 1..22: mol_type = other DNA
agctttccttgaactgttgcat

SEQ ID NO: 49832 - DNA, 22 bp, synthetic construct
  misc_feature 1..22: note = chemically synthesized
  source 1..22: mol_type = other DNA
tccttgaactgttgcattttaa

SEQ ID NO: 49833 - DNA, 22 bp, synthetic construct
  misc_feature 1..22: note = chemically synthesized
  source 1..22: mol_type = other DNA
ccttgaactgttgcattttaat

SEQ ID NO: 49834 - DNA, 22 bp, synthetic construct
  misc_feature 1..22: note = chemically synthesized
  source 1..22: mol_type = other DNA
cttgaactgttgcattttaatc

SEQ ID NO: 49835 - DNA, 22 bp, synthetic construct
  misc_feature 1..22: note = chemically synthesized
  source 1..22: mol_type = other DNA
gaactgttgcattttaatcctc

SEQ ID NO: 49836 - DNA, 22 bp, synthetic construct
  misc_feature 1..22: note = chemically synthesized
  source 1..22: mol_type = other DNA
aactgttgcattttaatcctca

SEQ ID NO: 49837 - DNA, 22 bp, synthetic construct
  misc_feature 1..22: note = chemically synthesized
  source 1..22: mol_type = other DNA
ttgcattttaatcctcacagca

SEQ ID NO: 49838 - DNA, 22 bp, synthetic construct
  misc_feature 1..22: note = chemically synthesized
  source 1..22: mol_type = other DNA
cattttaatcctcacagcagct

SEQ ID NO: 49839 - DNA, 22 bp, synthetic construct
  misc_feature 1..22: note = chemically synthesized
  source 1..22: mol_type = other DNA
taatcctcacagcagctcaaca

SEQ ID NO: 49840 - DNA, 22 bp, synthetic construct
  misc_feature 1..22: note = chemically synthesized
  source 1..22: mol_type = other DNA
aatcctcacagcagctcaacaa

SEQ ID NO: 49841 - DNA, 22 bp, synthetic construct
  misc_feature 1..22: note = chemically synthesized
  source 1..22: mol_type = other DNA
atcctcacagcagctcaacaag

SEQ ID NO: 49842 - DNA, 22 bp, synthetic construct
  misc_feature 1..22: note = chemically synthesized
  source 1..22: mol_type = other DNA
acagcagctcaacaaggtacat

SEQ ID NO: 49843 - DNA, 22 bp, synthetic construct
  misc_feature 1..22: note = chemically synthesized
  source 1..22: mol_type = other DNA
aacaaggtacataccgtcacca

SEQ ID NO: 49844 - DNA, 22 bp, synthetic construct
  misc_feature 1..22: note = chemically synthesized
  source 1..22: mol_type = other DNA
tacagatagggaaattgaggct

SEQ ID NO: 49845 - DNA, 22 bp, synthetic construct
  misc_feature 1..22: note = chemically synthesized
  source 1..22: mol_type = other DNA
acagatagggaaattgaggctc

SEQ ID NO: 49846 - DNA, 22 bp, synthetic construct
  misc_feature 1..22: note = chemically synthesized
  source 1..22: mol_type = other DNA
cagatagggaaattgaggctcg

SEQ ID NO: 49847 - DNA, 22 bp, synthetic construct
  misc_feature 1..22: note = chemically synthesized
  source 1..22: mol_type = other DNA
aggctcggagcggttaaacaac

SEQ ID NO: 49848 - DNA, 22 bp, synthetic construct
  misc_feature 1..22: note = chemically synthesized
  source 1..22: mol_type = other DNA
ggagcggttaaacaactcacct

SEQ ID NO: 49849 - DNA, 22 bp, synthetic construct
  misc_feature 1..22: note = chemically synthesized
  source 1..22: mol_type = other DNA
aacaactcacctgaggcctcac

SEQ ID NO: 49850 - DNA, 22 bp, synthetic construct
  misc_feature 1..22: note = chemically synthesized
  source 1..22: mol_type = other DNA
acctgaggcctcacagccagta

SEQ ID NO: 49851 - DNA, 22 bp, synthetic construct
  misc_feature 1..22: note = chemically synthesized
  source 1..22: mol_type = other DNA
aggcctcacagccagtaagtgg

SEQ ID NO: 49852 - DNA, 22 bp, synthetic construct
  misc_feature 1..22: note = chemically synthesized
  source 1..22: mol_type = other DNA
acagccagtaagtgggttccct

SEQ ID NO: 49853 - DNA, 22 bp, synthetic construct
  misc_feature 1..22: note = chemically synthesized
  source 1..22: mol_type = other DNA
cctggtctgaatgtgtgtgctg

SEQ ID NO: 49854 - DNA, 22 bp, synthetic construct
  misc_feature 1..22: note = chemically synthesized
  source 1..22: mol_type = other DNA
gtctgaatgtgtgtgctggagg

SEQ ID NO: 49855 - DNA, 22 bp, synthetic construct
  misc_feature 1..22: note = chemically synthesized
  source 1..22: mol_type = other DNA
aatgtgtgtgctggaggatcct

SEQ ID NO: 49856 - DNA, 22 bp, synthetic construct
  misc_feature 1..22: note = chemically synthesized
  source 1..22: mol_type = other DNA
gaggatcctgtgggtcactcgc

SEQ ID NO: 49857 - DNA, 22 bp, synthetic construct
  misc_feature 1..22: note = chemically synthesized
  source 1..22: mol_type = other DNA
tgggtcactcgcctggtagagc

SEQ ID NO: 49858 - DNA, 22 bp, synthetic construct
  misc_feature 1..22: note = chemically synthesized
  source 1..22: mol_type = other DNA
gcctggtagagccccaaggtgg

SEQ ID NO: 49859 - DNA, 22 bp, synthetic construct
  misc_feature 1..22: note = chemically synthesized
  source 1..22: mol_type = other DNA
gtagagccccaaggtggaggca

SEQ ID NO: 49860 - DNA, 22 bp, synthetic construct
  misc_feature 1..22: note = chemically synthesized
  source 1..22: mol_type = other DNA
gtgaatgacagaaggggcaaaa

SEQ ID NO: 49861 - DNA, 22 bp, synthetic construct
  misc_feature 1..22: note = chemically synthesized
  source 1..22: mol_type = other DNA
atccattcactctgcaagtatc

SEQ ID NO: 49862 - DNA, 22 bp, synthetic construct
  misc_feature 1..22: note = chemically synthesized
  source 1..22: mol_type = other DNA
actctgcaagtatctacggcac

SEQ ID NO: 49863 - DNA, 22 bp, synthetic construct
  misc_feature 1..22: note = chemically synthesized
  source 1..22: mol_type = other DNA
tgcaagtatctacggcacgtac

SEQ ID NO: 49864 - DNA, 22 bp, synthetic construct
  misc_feature 1..22: note = chemically synthesized
  source 1..22: mol_type = other DNA
caagtatctacggcacgtacgc

SEQ ID NO: 49865 - DNA, 22 bp, synthetic construct
  misc_feature 1..22: note = chemically synthesized
  source 1..22: mol_type = other DNA
cggcacgtacgccagctcccaa

SEQ ID NO: 49866 - DNA, 22 bp, synthetic construct
  misc_feature 1..22: note = chemically synthesized
  source 1..22: mol_type = other DNA
ccaagcaggtttgcgggttgca

SEQ ID NO: 49867 - DNA, 22 bp, synthetic construct
  misc_feature 1..22: note = chemically synthesized
  source 1..22: mol_type = other DNA
gcgggttgcacagcgggcgatg

SEQ ID NO: 49868 - DNA, 22 bp, synthetic construct
  misc_feature 1..22: note = chemically synthesized
  source 1..22: mol_type = other DNA
cgggttgcacagcgggcgatgc

SEQ ID NO: 49869 - DNA, 22 bp, synthetic construct
  misc_feature 1..22: note = chemically synthesized
  source 1..22: mol_type = other DNA
cacagcgggcgatgcaatctga

SEQ ID NO: 49870 - DNA, 22 bp, synthetic construct
  misc_feature 1..22: note = chemically synthesized
  source 1..22: mol_type = other DNA
atttaggcttttaaagggattg

SEQ ID NO: 49871 - DNA, 22 bp, synthetic construct
  misc_feature 1..22: note = chemically synthesized
  source 1..22: mol_type = other DNA
aggcttttaaagggattgcaat

SEQ ID NO: 49872 - DNA, 22 bp, synthetic construct
  misc_feature 1..22: note = chemically synthesized
  source 1..22: mol_type = other DNA
ggcttttaaagggattgcaatc

SEQ ID NO: 49873 - DNA, 22 bp, synthetic construct
  misc_feature 1..22: note = chemically synthesized
  source 1..22: mol_type = other DNA
ttaaagggattgcaatcaagtg

SEQ ID NO: 49874 - DNA, 22 bp, synthetic construct
  misc_feature 1..22: note = chemically synthesized
  source 1..22: mol_type = other DNA
taaagggattgcaatcaagtgg

SEQ ID NO: 49875 - DNA, 22 bp, synthetic construct
  misc_feature 1..22: note = chemically synthesized
  source 1..22: mol_type = other DNA
aaagggattgcaatcaagtggg

SEQ ID NO: 49876 - DNA, 22 bp, synthetic construct
  misc_feature 1..22: note = chemically synthesized
  source 1..22: mol_type = other DNA
aagggattgcaatcaagtgggg

SEQ ID NO: 49877 - DNA, 22 bp, synthetic construct
  misc_feature 1..22: note = chemically synthesized
  source 1..22: mol_type = other DNA
caatcaagtggggccccactag

SEQ ID NO: 49878 - DNA, 22 bp, synthetic construct
  misc_feature 1..22: note = chemically synthesized
  source 1..22: mol_type = other DNA
gcctcaaccctgtacctcccct

SEQ ID NO: 49879 - DNA, 22 bp, synthetic construct
  misc_feature 1..22: note = chemically synthesized
  source 1..22: mol_type = other DNA
aaccctgtacctcccctcccct

SEQ ID NO: 49880 - DNA, 22 bp, synthetic construct
  misc_feature 1..22: note = chemically synthesized
  source 1..22: mol_type = other DNA
tacctcccctcccctccacccc

SEQ ID NO: 49881 - DNA, 22 bp, synthetic construct
  misc_feature 1..22: note = chemically synthesized
  source 1..22: mol_type = other DNA
ccctcccctccacccccagcag

SEQ ID NO: 49882 - DNA, 22 bp, synthetic construct
  misc_feature 1..22: note = chemically synthesized
  source 1..22: mol_type = other DNA
ccctccacccccagcagtctcc

SEQ ID NO: 49883 - DNA, 22 bp, synthetic construct
  misc_feature 1..22: note = chemically synthesized
  source 1..22: mol_type = other DNA
cacccccagcagtctccaaagg

SEQ ID NO: 49884 - DNA, 22 bp, synthetic construct
  misc_feature 1..22: note = chemically synthesized
  source 1..22: mol_type = other DNA
caaaggcctccaacaaccccag

SEQ ID NO: 49885 - DNA, 22 bp, synthetic construct
  misc_feature 1..22: note = chemically synthesized
  source 1..22: mol_type = other DNA
caacaaccccagagtgggggcc

SEQ ID NO: 49886 - DNA, 22 bp, synthetic construct
  misc_feature 1..22: note = chemically synthesized
  source 1..22: mol_type = other DNA
caagctgtatacggatcacact

SEQ ID NO: 49887 - DNA, 22 bp, synthetic construct
  misc_feature 1..22: note = chemically synthesized
  source 1..22: mol_type = other DNA
tatacggatcacactggttttc

SEQ ID NO: 49888 - DNA, 22 bp, synthetic construct
  misc_feature 1..22: note = chemically synthesized
  source 1..22: mol_type = other DNA
gttttccaggagcaaaaacaga

SEQ ID NO: 49889 - DNA, 22 bp, synthetic construct
  misc_feature 1..22: note = chemically synthesized
  source 1..22: mol_type = other DNA
tccaggagcaaaaacagaaaca

SEQ ID NO: 49890 - DNA, 22 bp, synthetic construct
  misc_feature 1..22: note = chemically synthesized
  source 1..22: mol_type = other DNA
ccaggagcaaaaacagaaacag

SEQ ID NO: 49891 - DNA, 22 bp, synthetic construct
  misc_feature 1..22: note = chemically synthesized
  source 1..22: mol_type = other DNA
caggagcaaaaacagaaacagg

SEQ ID NO: 49892 - DNA, 22 bp, synthetic construct
  misc_feature 1..22: note = chemically synthesized
  source 1..22: mol_type = other DNA
aggctggtcaaaattgaacctc

SEQ ID NO: 49893 - DNA, 22 bp, synthetic construct
  misc_feature 1..22: note = chemically synthesized
  source 1..22: mol_type = other DNA
gtcaaaattgaacctcctcctg

SEQ ID NO: 49894 - DNA, 22 bp, synthetic construct
  misc_feature 1..22: note = chemically synthesized
  source 1..22: mol_type = other DNA
aacctcctcctgctctgagcag

SEQ ID NO: 49895 - DNA, 22 bp, synthetic construct
  misc_feature 1..22: note = chemically synthesized
  source 1..22: mol_type = other DNA
ctcctgctctgagcagcctggg

SEQ ID NO: 49896 - DNA, 22 bp, synthetic construct
  misc_feature 1..22: note = chemically synthesized
  source 1..22: mol_type = other DNA
ctgctctgagcagcctgggggg

SEQ ID NO: 49897 - DNA, 22 bp, synthetic construct
  misc_feature 1..22: note = chemically synthesized
  source 1..22: mol_type = other DNA
ctctgagcagcctggggggcag

SEQ ID NO: 49898 - DNA, 22 bp, synthetic construct
  misc_feature 1..22: note = chemically synthesized
  source 1..22: mol_type = other DNA
tgagcagcctggggggcagact

SEQ ID NO: 49899 - DNA, 22 bp, synthetic construct
  misc_feature 1..22: note = chemically synthesized
  source 1..22: mol_type = other DNA
agcagcctggggggcagactaa

SEQ ID NO: 49900 - DNA, 22 bp, synthetic construct
  misc_feature 1..22: note = chemically synthesized
  source 1..22: mol_type = other DNA
gggggcagactaagcagagggc

SEQ ID NO: 49901 - DNA, 22 bp, synthetic construct
  misc_feature 1..22: note = chemically synthesized
  source 1..22: mol_type = other DNA
agcagagggctgtgcagaccca

SEQ ID NO: 49902 - DNA, 22 bp, synthetic construct
  misc_feature 1..22: note = chemically synthesized
  source 1..22: mol_type = other DNA
tgcagacccacataaagagcct

SEQ ID NO: 49903 - DNA, 22 bp, synthetic construct
  misc_feature 1..22: note = chemically synthesized
  source 1..22: mol_type = other DNA
ctgtgtgccaggcacttcaccc

SEQ ID NO: 49904 - DNA, 22 bp, synthetic construct
  misc_feature 1..22: note = chemically synthesized
  source 1..22: mol_type = other DNA
tgtgccaggcacttcacccgag

SEQ ID NO: 49905 - DNA, 22 bp, synthetic construct
  misc_feature 1..22: note = chemically synthesized
  source 1..22: mol_type = other DNA
cacccgaggcacttcacaagca

SEQ ID NO: 49906 - DNA, 22 bp, synthetic construct
  misc_feature 1..22: note = chemically synthesized
  source 1..22: mol_type = other DNA
acccgaggcacttcacaagcat

SEQ ID NO: 49907 - DNA, 22 bp, synthetic construct
  misc_feature 1..22: note = chemically synthesized
  source 1..22: mol_type = other DNA
cacaagcatgcttgggaatgaa

SEQ ID NO: 49908 - DNA, 22 bp, synthetic construct
  misc_feature 1..22: note = chemically synthesized
  source 1..22: mol_type = other DNA
acaagcatgcttgggaatgaaa

SEQ ID NO: 49909 - DNA, 22 bp, synthetic construct
  misc_feature 1..22: note = chemically synthesized
  source 1..22: mol_type = other DNA
gggaatgaaacttccaactctt

SEQ ID NO: 49910 - DNA, 22 bp, synthetic construct
  misc_feature 1..22: note = chemically synthesized
  source 1..22: mol_type = other DNA
ggaatgaaacttccaactcttt

SEQ ID NO: 49911 - DNA, 22 bp, synthetic construct
  misc_feature 1..22: note = chemically synthesized
  source 1..22: mol_type = other DNA
ccaactctttgggatgcaggtg

SEQ ID NO: 49912 - DNA, 22 bp, synthetic construct
  misc_feature 1..22: note = chemically synthesized
  source 1..22: mol_type = other DNA
caactctttgggatgcaggtga

SEQ ID NO: 49913 - DNA, 22 bp, synthetic construct
  misc_feature 1..22: note = chemically synthesized
  source 1..22: mol_type = other DNA
tttgggatgcaggtgaaacagt

SEQ ID NO: 49914 - DNA, 22 bp, synthetic construct
  misc_feature 1..22: note = chemically synthesized
  source 1..22: mol_type = other DNA
tgggatgcaggtgaaacagttc

SEQ ID NO: 49915 - DNA, 22 bp, synthetic construct
  misc_feature 1..22: note = chemically synthesized
  source 1..22: mol_type = other DNA
gggatgcaggtgaaacagttcc

SEQ ID NO: 49916 - DNA, 22 bp, synthetic construct
  misc_feature 1..22: note = chemically synthesized
  source 1..22: mol_type = other DNA
ggatgcaggtgaaacagttcct

SEQ ID NO: 49917 - DNA, 22 bp, synthetic construct
  misc_feature 1..22: note = chemically synthesized
  source 1..22: mol_type = other DNA
ctggttcagagaggtgaagcgg

SEQ ID NO: 49918 - DNA, 22 bp, synthetic construct
  misc_feature 1..22: note = chemically synthesized
  source 1..22: mol_type = other DNA
gttcagagaggtgaagcggcct

SEQ ID NO: 49919 - DNA, 22 bp, synthetic construct
  misc_feature 1..22: note = chemically synthesized
  source 1..22: mol_type = other DNA
agagaggtgaagcggcctgcct

SEQ ID NO: 49920 - DNA, 22 bp, synthetic construct
  misc_feature 1..22: note = chemically synthesized
  source 1..22: mol_type = other DNA
cctgaggcagcacagctcttct

SEQ ID NO: 49921 - DNA, 22 bp, synthetic construct
  misc_feature 1..22: note = chemically synthesized
  source 1..22: mol_type = other DNA
aggcagcacagctcttctttac

SEQ ID NO: 49922 - DNA, 22 bp, synthetic construct
  misc_feature 1..22: note = chemically synthesized
  source 1..22: mol_type = other DNA
ttctttacagatgtgcttcccc

SEQ ID NO: 49923 - DNA, 22 bp, synthetic construct
  misc_feature 1..22: note = chemically synthesized
  source 1..22: mol_type = other DNA
ctttacagatgtgcttccccac

SEQ ID NO: 49924 - DNA, 22 bp, synthetic construct
  misc_feature 1..22: note = chemically synthesized
  source 1..22: mol_type = other DNA
tttacagatgtgcttccccacc

SEQ ID NO: 49925 - DNA, 22 bp, synthetic construct
  misc_feature 1..22: note = chemically synthesized
  source 1..22: mol_type = other DNA
tacagatgtgcttccccacctc

SEQ ID NO: 49926 - DNA, 22 bp, synthetic construct
  misc_feature 1..22: note = chemically synthesized
  source 1..22: mol_type = other DNA
acagatgtgcttccccacctct

SEQ ID NO: 49927 - DNA, 22 bp, synthetic construct
  misc_feature 1..22: note = chemically synthesized
  source 1..22: mol_type = other DNA
cagatgtgcttccccacctcta

SEQ ID NO: 49928 - DNA, 22 bp, synthetic construct
  misc_feature 1..22: note = chemically synthesized
  source 1..22: mol_type = other DNA
ccccacctctaccctgtctcac

SEQ ID NO: 49929 - DNA, 22 bp, synthetic construct
  misc_feature 1..22: note = chemically synthesized
  source 1..22: mol_type = other DNA
cccacctctaccctgtctcacg

SEQ ID NO: 49930 - DNA, 22 bp, synthetic construct
  misc_feature 1..22: note = chemically synthesized
  source 1..22: mol_type = other DNA
taccctgtctcacggcccccca

SEQ ID NO: 49931 - DNA, 22 bp, synthetic construct
  misc_feature 1..22: note = chemically synthesized
  source 1..22: mol_type = other DNA
ccctgtctcacggccccccatg

SEQ ID NO: 49932 - DNA, 22 bp, synthetic construct
  misc_feature 1..22: note = chemically synthesized
  source 1..22: mol_type = other DNA
tctcacggccccccatgccagc

SEQ ID NO: 49933 - DNA, 22 bp, synthetic construct
  misc_feature 1..22: note = chemically synthesized
  source 1..22: mol_type = other DNA
acggccccccatgccagcctga

SEQ ID NO: 49934 - DNA, 22 bp, synthetic construct
  misc_feature 1..22: note = chemically synthesized
  source 1..22: mol_type = other DNA
acggttgtgtctgcctcagtca

SEQ ID NO: 49935 - DNA, 22 bp, synthetic construct
  misc_feature 1..22: note = chemically synthesized
  source 1..22: mol_type = other DNA
tgtctgcctcagtcatgctcca

SEQ ID NO: 49936 - DNA, 22 bp, synthetic construct
  misc_feature 1..22: note = chemically synthesized
  source 1..22: mol_type = other DNA
cctcagtcatgctccatttttc

SEQ ID NO: 49937 - DNA, 22 bp, synthetic construct
  misc_feature 1..22: note = chemically synthesized
  source 1..22: mol_type = other DNA
agtcatgctccatttttccatc

SEQ ID NO: 49938 - DNA, 22 bp, synthetic construct
  misc_feature 1..22: note = chemically synthesized
  source 1..22: mol_type = other DNA
catttttccatcgggaccatca

SEQ ID NO: 49939 - DNA, 22 bp, synthetic construct
  misc_feature 1..22: note = chemically synthesized
  source 1..22: mol_type = other DNA
ttccatcgggaccatcaagagg

SEQ ID NO: 49940 - DNA, 22 bp, synthetic construct
  misc_feature 1..22: note = chemically synthesized
  source 1..22: mol_type = other DNA
tccatcgggaccatcaagaggg

SEQ ID NO: 49941 - DNA, 22 bp, synthetic construct
  misc_feature 1..22: note = chemically synthesized
  source 1..22: mol_type = other DNA
ccatcgggaccatcaagagggt

SEQ ID NO: 49942 - DNA, 22 bp, synthetic construct
  misc_feature 1..22: note = chemically synthesized
  source 1..22: mol_type = other DNA
catcgggaccatcaagagggtg

SEQ ID NO: 49943 - DNA, 22 bp, synthetic construct
  misc_feature 1..22: note = chemically synthesized
  source 1..22: mol_type = other DNA
gtgtctaaggctgactgggtaa

SEQ ID NO: 49944 - DNA, 22 bp, synthetic construct
  misc_feature 1..22: note = chemically synthesized
  source 1..22: mol_type = other DNA
tgtctaaggctgactgggtaac

SEQ ID NO: 49945 - DNA, 22 bp, synthetic construct
  misc_feature 1..22: note = chemically synthesized
  source 1..22: mol_type = other DNA
aggctgactgggtaactttgga

SEQ ID NO: 49946 - DNA, 22 bp, synthetic construct
  misc_feature 1..22: note = chemically synthesized
  source 1..22: mol_type = other DNA
actgggtaactttggatgagcg

SEQ ID NO: 49947 - DNA, 22 bp, synthetic construct
  misc_feature 1..22: note = chemically synthesized
  source 1..22: mol_type = other DNA
ggtaactttggatgagcggtct

SEQ ID NO: 49948 - DNA, 22 bp, synthetic construct
  misc_feature 1..22: note = chemically synthesized
  source 1..22: mol_type = other DNA
tggatgagcggtctctccgctc

SEQ ID NO: 49949 - DNA, 22 bp, synthetic construct
  misc_feature 1..22: note = chemically synthesized
  source 1..22: mol_type = other DNA
ggatgagcggtctctccgctct

SEQ ID NO: 49950 - DNA, 22 bp, synthetic construct
  misc_feature 1..22: note = chemically synthesized
  source 1..22: mol_type = other DNA
gatgagcggtctctccgctctg

SEQ ID NO: 49951 - DNA, 22 bp, synthetic construct
  misc_feature 1..22: note = chemically synthesized
  source 1..22: mol_type = other DNA
tccgctctgagcctgtttcctc

SEQ ID NO: 49952 - DNA, 22 bp, synthetic construct
  misc_feature 1..22: note = chemically synthesized
  source 1..22: mol_type = other DNA
cgctctgagcctgtttcctcat

SEQ ID NO: 49953 - DNA, 22 bp, synthetic construct
  misc_feature 1..22: note = chemically synthesized
  source 1..22: mol_type = other DNA
tgagcctgtttcctcatctgtc

SEQ ID NO: 49954 - DNA, 22 bp, synthetic construct
  misc_feature 1..22: note = chemically synthesized
  source 1..22: mol_type = other DNA
agcctgtttcctcatctgtcaa

SEQ ID NO: 49955 - DNA, 22 bp, synthetic construct
  misc_feature 1..22: note = chemically synthesized
  source 1..22: mol_type = other DNA
tttcctcatctgtcaaatgggc

SEQ ID NO: 49956 - DNA, 22 bp, synthetic construct
  misc_feature 1..22: note = chemically synthesized
  source 1..22: mol_type = other DNA
cctcatctgtcaaatgggctct

SEQ ID NO: 49957 - DNA, 22 bp, synthetic construct
  misc_feature 1..22: note = chemically synthesized
  source 1..22: mol_type = other DNA
ctcatctgtcaaatgggctcta

SEQ ID NO: 49958 - DNA, 22 bp, synthetic construct
  misc_feature 1..22: note = chemically synthesized
  source 1..22: mol_type = other DNA
atctgtcaaatgggctctaacc

SEQ ID NO: 49959 - DNA, 22 bp, synthetic construct
  misc_feature 1..22: note = chemically synthesized
  source 1..22: mol_type = other DNA
tcaaatgggctctaacccactc

SEQ ID NO: 49960 - DNA, 22 bp, synthetic construct
  misc_feature 1..22: note = chemically synthesized
  source 1..22: mol_type = other DNA
taacccactctgatctcccagg

SEQ ID NO: 49961 - DNA, 22 bp, synthetic construct
  misc_feature 1..22: note = chemically synthesized
  source 1..22: mol_type = other DNA
acccactctgatctcccagggc

SEQ ID NO: 49962 - DNA, 22 bp, synthetic construct
  misc_feature 1..22: note = chemically synthesized
  source 1..22: mol_type = other DNA
tgatctcccagggcggcagtaa

SEQ ID NO: 49963 - DNA, 22 bp, synthetic construct
  misc_feature 1..22: note = chemically synthesized
  source 1..22: mol_type = other DNA
atctcccagggcggcagtaagt

SEQ ID NO: 49964 - DNA, 22 bp, synthetic construct
  misc_feature 1..22: note = chemically synthesized
  source 1..22: mol_type = other DNA
ccagggcggcagtaagtcttca

SEQ ID NO: 49965 - DNA, 22 bp, synthetic construct
  misc_feature 1..22: note = chemically synthesized
  source 1..22: mol_type = other DNA
cagcatcaggcattttggggtg

SEQ ID NO: 49966 - DNA, 22 bp, synthetic construct
  misc_feature 1..22: note = chemically synthesized
  source 1..22: mol_type = other DNA
agcatcaggcattttggggtga

SEQ ID NO: 49967 - DNA, 22 bp, synthetic construct
  misc_feature 1..22: note = chemically synthesized
  source 1..22: mol_type = other DNA
tggggtgactcagtaaatggta

SEQ ID NO: 49968 - DNA, 22 bp, synthetic construct
  misc_feature 1..22: note = chemically synthesized
  source 1..22: mol_type = other DNA
ggggtgactcagtaaatggtag

SEQ ID NO: 49969 - DNA, 22 bp, synthetic construct
  misc_feature 1..22: note = chemically synthesized
  source 1..22: mol_type = other DNA
gggtgactcagtaaatggtaga

SEQ ID NO: 49970 - DNA, 22 bp, synthetic construct
  misc_feature 1..22: note = chemically synthesized
  source 1..22: mol_type = other DNA
agtaaatggtagatcttgctac

SEQ ID NO: 49971 - DNA, 22 bp, synthetic construct
  misc_feature 1..22: note = chemically synthesized
  source 1..22: mol_type = other DNA
gctaccagtggaacagccacta

SEQ ID NO: 49972 - DNA, 22 bp, synthetic construct
  misc_feature 1..22: note = chemically synthesized
  source 1..22: mol_type = other DNA
ctaccagtggaacagccactaa

SEQ ID NO: 49973 - DNA, 22 bp, synthetic construct
  misc_feature 1..22: note = chemically synthesized
  source 1..22: mol_type = other DNA
ccagtggaacagccactaagga

SEQ ID NO: 49974 - DNA, 22 bp, synthetic construct
  misc_feature 1..22: note = chemically synthesized
  source 1..22: mol_type = other DNA
aggattctgcagtgagagcaga

SEQ ID NO: 49975 - DNA, 22 bp, synthetic construct
  misc_feature 1..22: note = chemically synthesized
  source 1..22: mol_type = other DNA
tgcagtgagagcagagggccag

SEQ ID NO: 49976 - DNA, 22 bp, synthetic construct
  misc_feature 1..22: note = chemically synthesized
  source 1..22: mol_type = other DNA
cagtgagagcagagggccagct

SEQ ID NO: 49977 - DNA, 22 bp, synthetic construct
  misc_feature 1..22: note = chemically synthesized
  source 1..22: mol_type = other DNA
agtggtactctcccagagactg

SEQ ID NO: 49978 - DNA, 22 bp, synthetic construct
  misc_feature 1..22: note = chemically synthesized
  source 1..22: mol_type = other DNA
tcccagagactgtctgactcac

SEQ ID NO: 49979 - DNA, 22 bp, synthetic construct
  misc_feature 1..22: note = chemically synthesized
  source 1..22: mol_type = other DNA
ccagagactgtctgactcacgc

SEQ ID NO: 49980 - DNA, 22 bp, synthetic construct
  misc_feature 1..22: note = chemically synthesized
  source 1..22: mol_type = other DNA
tctgactcacgccaccccctcc

SEQ ID NO: 49981 - DNA, 22 bp, synthetic construct
  misc_feature 1..22: note = chemically synthesized
  source 1..22: mol_type = other DNA
actcacgccaccccctccacct

SEQ ID NO: 49982 - DNA, 22 bp, synthetic construct
  misc_feature 1..22: note = chemically synthesized
  source 1..22: mol_type = other DNA
acgccaccccctccaccttgga

SEQ ID NO: 49983 - DNA, 22 bp, synthetic construct
  misc_feature 1..22: note = chemically synthesized
  source 1..22: mol_type = other DNA
caccttggacacaggacgctgt

SEQ ID NO: 49984 - DNA, 22 bp, synthetic construct
  misc_feature 1..22: note = chemically synthesized
  source 1..22: mol_type = other DNA
ggacacaggacgctgtggtttc

SEQ ID NO: 49985 - DNA, 22 bp, synthetic construct
  misc_feature 1..22: note = chemically synthesized
  source 1..22: mol_type = other DNA
gacacaggacgctgtggtttct

SEQ ID NO: 49986 - DNA, 22 bp, synthetic construct
  misc_feature 1..22: note = chemically synthesized
  source 1..22: mol_type = other DNA
tggtttctgagccaggtacaat

SEQ ID NO: 49987 - DNA, 22 bp, synthetic construct
  misc_feature 1..22: note = chemically synthesized
  source 1..22: mol_type = other DNA
ctgagccaggtacaatgactcc

SEQ ID NO: 49988 - DNA, 22 bp, synthetic construct
  misc_feature 1..22: note = chemically synthesized
  source 1..22: mol_type = other DNA
tgagccaggtacaatgactcct

SEQ ID NO: 49989 - DNA, 22 bp, synthetic construct
  misc_feature 1..22: note = chemically synthesized
  source 1..22: mol_type = other DNA
agccaggtacaatgactccttt

SEQ ID NO: 49990 - DNA, 22 bp, synthetic construct
  misc_feature 1..22: note = chemically synthesized
  source 1..22: mol_type = other DNA
ctttcggtaagtgcagtggaag

SEQ ID NO: 49991 - DNA, 22 bp, synthetic construct
  misc_feature 1..22: note = chemically synthesized
  source 1..22: mol_type = other DNA
tcggtaagtgcagtggaagctg

SEQ ID NO: 49992 - DNA, 22 bp, synthetic construct
  misc_feature 1..22: note = chemically synthesized
  source 1..22: mol_type = other DNA
cggtaagtgcagtggaagctgt

SEQ ID NO: 49993 - DNA, 22 bp, synthetic construct
  misc_feature 1..22: note = chemically synthesized
  source 1..22: mol_type = other DNA
ggtaagtgcagtggaagctgta

SEQ ID NO: 49994 - DNA, 22 bp, synthetic construct
  misc_feature 1..22: note = chemically synthesized
  source 1..22: mol_type = other DNA
tacactgcccaggcaaagcgtc

SEQ ID NO: 49995 - DNA, 22 bp, synthetic construct
  misc_feature 1..22: note = chemically synthesized
  source 1..22: mol_type = other DNA
cccaggcaaagcgtccgggcag

SEQ ID NO: 49996 - DNA, 22 bp, synthetic construct
  misc_feature 1..22: note = chemically synthesized
  source 1..22: mol_type = other DNA
agatcccagccagtggacttag

SEQ ID NO: 49997 - DNA, 22 bp, synthetic construct
  misc_feature 1..22: note = chemically synthesized
  source 1..22: mol_type = other DNA
agcccctgtttgctcctccgat

SEQ ID NO: 49998 - DNA, 22 bp, synthetic construct
  misc_feature 1..22: note = chemically synthesized
  source 1..22: mol_type = other DNA
gcccctgtttgctcctccgata

SEQ ID NO: 49999 - DNA, 22 bp, synthetic construct
  misc_feature 1..22: note = chemically synthesized
  source 1..22: mol_type = other DNA
tttgctcctccgataactgggg

SEQ ID NO: 50000 - DNA, 22 bp, synthetic construct
  misc_feature 1..22: note = chemically synthesized
  source 1..22: mol_type = other DNA
gctcctccgataactggggtga

SEQ ID NO: 50001 - DNA, 22 bp, synthetic construct
  misc_feature 1..22: note = chemically synthesized
  source 1..22: mol_type = other DNA
ctcctccgataactggggtgac

SEQ ID NO: 50002 - DNA, 22 bp, synthetic construct
  misc_feature 1..22: note = chemically synthesized
  source 1..22: mol_type = other DNA
ctccgataactggggtgacctt

SEQ ID NO: 50003 - DNA, 22 bp, synthetic construct
  misc_feature 1..22: note = chemically synthesized
  source 1..22: mol_type = other DNA
cgataactggggtgaccttggt

SEQ ID NO: 50004 - DNA, 22 bp, synthetic construct
  misc_feature 1..22: note = chemically synthesized
  source 1..22: mol_type = other DNA
gggtgaccttggttaatattca

SEQ ID NO: 50005 - DNA, 22 bp, synthetic construct
  misc_feature 1..22: note = chemically synthesized
  source 1..22: mol_type = other DNA
ggttaatattcaccagcagcct

SEQ ID NO: 50006 - DNA, 22 bp, synthetic construct
  misc_feature 1..22: note = chemically synthesized
  source 1..22: mol_type = other DNA
gttaatattcaccagcagcctc

SEQ ID NO: 50007 - DNA, 22 bp, synthetic construct
  misc_feature 1..22: note = chemically synthesized
  source 1..22: mol_type = other DNA
atattcaccagcagcctccccc

SEQ ID NO: 50008 - DNA, 22 bp, synthetic construct
  misc_feature 1..22: note = chemically synthesized
  source 1..22: mol_type = other DNA
accagcagcctcccccgttgcc

SEQ ID NO: 50009 - DNA, 22 bp, synthetic construct
  misc_feature 1..22: note = chemically synthesized
  source 1..22: mol_type = other DNA
ccccgttgcccctctggatcca

SEQ ID NO: 50010 - DNA, 22 bp, synthetic construct
  misc_feature 1..22: note = chemically synthesized
  source 1..22: mol_type = other DNA
cccctctggatccactgcttaa

SEQ ID NO: 50011 - DNA, 22 bp, synthetic construct
  misc_feature 1..22: note = chemically synthesized
  source 1..22: mol_type = other DNA
tggatccactgcttaaatacgg

SEQ ID NO: 50012 - DNA, 22 bp, synthetic construct
  misc_feature 1..22: note = chemically synthesized
  source 1..22: mol_type = other DNA
gatccactgcttaaatacggac

SEQ ID NO: 50013 - DNA, 22 bp, synthetic construct
  misc_feature 1..22: note = chemically synthesized
  source 1..22: mol_type = other DNA
cttaaatacggacgaggacagg

SEQ ID NO: 50014 - DNA, 22 bp, synthetic construct
  misc_feature 1..22: note = chemically synthesized
  source 1..22: mol_type = other DNA
aaatacggacgaggacagggcc

SEQ ID NO: 50015 - DNA, 22 bp, synthetic construct
  misc_feature 1..22: note = chemically synthesized
  source 1..22: mol_type = other DNA
aatacggacgaggacagggccc

SEQ ID NO: 50016 - DNA, 22 bp, synthetic construct
  misc_feature 1..22: note = chemically synthesized
  source 1..22: mol_type = other DNA
tctcctcagcttcaggcaccac

SEQ ID NO: 50017 - DNA, 22 bp, synthetic construct
  misc_feature 1..22: note = chemically synthesized
  source 1..22: mol_type = other DNA
ctcagcttcaggcaccaccact

SEQ ID NO: 50018 - DNA, 22 bp, synthetic construct
  misc_feature 1..22: note = chemically synthesized
  source 1..22: mol_type = other DNA
agcttcaggcaccaccactgac

SEQ ID NO: 50019 - DNA, 22 bp, synthetic construct
  misc_feature 1..22: note = chemically synthesized
  source 1..22: mol_type = other DNA
caggcaccaccactgacctggg

SEQ ID NO: 50020 - DNA, 22 bp, synthetic construct
  misc_feature 1..22: note = chemically synthesized
  source 1..22: mol_type = other DNA
aggcaccaccactgacctggga

SEQ ID NO: 50021 - DNA, 22 bp, synthetic construct
  misc_feature 1..22: note = chemically synthesized
  source 1..22: mol_type = other DNA
acctgggacagtgaatcgtaag

SEQ ID NO: 50022 - DNA, 22 bp, synthetic construct
  misc_feature 1..22: note = chemically synthesized
  source 1..22: mol_type = other DNA
ggacagtgaatcgtaagtatgc

SEQ ID NO: 50023 - DNA, 22 bp, synthetic construct
  misc_feature 1..22: note = chemically synthesized
  source 1..22: mol_type = other DNA
tcactgcgagaggttctggaga

SEQ ID NO: 50024 - DNA, 22 bp, synthetic construct
  misc_feature 1..22: note = chemically synthesized
  source 1..22: mol_type = other DNA
cactgcgagaggttctggagag

SEQ ID NO: 50025 - DNA, 22 bp, synthetic construct
  misc_feature 1..22: note = chemically synthesized
  source 1..22: mol_type = other DNA
actgcgagaggttctggagagg

SEQ ID NO: 50026 - DNA, 22 bp, synthetic construct
  misc_feature 1..22: note = chemically synthesized
  source 1..22: mol_type = other DNA
cgagaggttctggagaggcttc

SEQ ID NO: 50027 - DNA, 22 bp, synthetic construct
  misc_feature 1..22: note = chemically synthesized
  source 1..22: mol_type = other DNA
tggagaggcttctgagctcccc

SEQ ID NO: 50028 - DNA, 22 bp, synthetic construct
  misc_feature 1..22: note = chemically synthesized
  source 1..22: mol_type = other DNA
gagaggcttctgagctccccat

SEQ ID NO: 50029 - DNA, 22 bp, synthetic construct
  misc_feature 1..22: note = chemically synthesized
  source 1..22: mol_type = other DNA
ctgagctccccatggcccaggc

SEQ ID NO: 50030 - DNA, 22 bp, synthetic construct
  misc_feature 1..22: note = chemically synthesized
  source 1..22: mol_type = other DNA
tgagctccccatggcccaggca

SEQ ID NO: 50031 - DNA, 22 bp, synthetic construct
  misc_feature 1..22: note = chemically synthesized
  source 1..22: mol_type = other DNA
agctccccatggcccaggcagg

SEQ ID NO: 50032 - DNA, 22 bp, synthetic construct
  misc_feature 1..22: note = chemically synthesized
  source 1..22: mol_type = other DNA
cccatggcccaggcaggcagca

SEQ ID NO: 50033 - DNA, 22 bp, synthetic construct
  misc_feature 1..22: note = chemically synthesized
  source 1..22: mol_type = other DNA
gggcaggaggggggttgtggag

SEQ ID NO: 50034 - DNA, 22 bp, synthetic construct
  misc_feature 1..22: note = chemically synthesized
  source 1..22: mol_type = other DNA
tggagtgggtatccgcctgctg

SEQ ID NO: 50035 - DNA, 22 bp, synthetic construct
  misc_feature 1..22: note = chemically synthesized
  source 1..22: mol_type = other DNA
ctgaggtgcagggcagatggag

SEQ ID NO: 50036 - DNA, 22 bp, synthetic construct
  misc_feature 1..22: note = chemically synthesized
  source 1..22: mol_type = other DNA
aggtgcagggcagatggagagg

SEQ ID NO: 50037 - DNA, 22 bp, synthetic construct
  misc_feature 1..22: note = chemically synthesized
  source 1..22: mol_type = other DNA
cagctgagctcctattttcata

SEQ ID NO: 50038 - DNA, 22 bp, synthetic construct
  misc_feature 1..22: note = chemically synthesized
  source 1..22: mol_type = other DNA
agctcctattttcataataaca

SEQ ID NO: 50039 - DNA, 22 bp, synthetic construct
  misc_feature 1..22: note = chemically synthesized
  source 1..22: mol_type = other DNA
ctattttcataataacagcagc

SEQ ID NO: 50040 - DNA, 22 bp, synthetic construct
  misc_feature 1..22: note = chemically synthesized
  source 1..22: mol_type = other DNA
ttttcataataacagcagccat

SEQ ID NO: 50041 - DNA, 22 bp, synthetic construct
  misc_feature 1..22: note = chemically synthesized
  source 1..22: mol_type = other DNA
tcataataacagcagccatgag

SEQ ID NO: 50042 - DNA, 22 bp, synthetic construct
  misc_feature 1..22: note = chemically synthesized
  source 1..22: mol_type = other DNA
cataataacagcagccatgagg

SEQ ID NO: 50043 - DNA, 22 bp, synthetic construct
  misc_feature 1..22: note = chemically synthesized
  source 1..22: mol_type = other DNA
ataataacagcagccatgaggg

SEQ ID NO: 50044 - DNA, 22 bp, synthetic construct
  misc_feature 1..22: note = chemically synthesized
  source 1..22: mol_type = other DNA
tgtcctgtttcccagtcctgcc

SEQ ID NO: 50045 - DNA, 22 bp, synthetic construct
  misc_feature 1..22: note = chemically synthesized
  source 1..22: mol_type = other DNA
tttcccagtcctgcccggtccc

SEQ ID NO: 50046 - DNA, 22 bp, synthetic construct
  misc_feature 1..22: note = chemically synthesized
  source 1..22: mol_type = other DNA
cccagtcctgcccggtcccccc

SEQ ID NO: 50047 - DNA, 22 bp, synthetic construct
  misc_feature 1..22: note = chemically synthesized
  source 1..22: mol_type = other DNA
ccagtcctgcccggtcccccct

SEQ ID NO: 50048 - DNA, 22 bp, synthetic construct
  misc_feature 1..22: note = chemically synthesized
  source 1..22: mol_type = other DNA
cccggtcccccctcggtacctc

SEQ ID NO: 50049 - DNA, 22 bp, synthetic construct
  misc_feature 1..22: note = chemically synthesized
  source 1..22: mol_type = other DNA
ggtacctcctggtggatacact

SEQ ID NO: 50050 - DNA, 22 bp, synthetic construct
  misc_feature 1..22: note = chemically synthesized
  source 1..22: mol_type = other DNA
ctggtggatacactggttcctg

SEQ ID NO: 50051 - DNA, 22 bp, synthetic construct
  misc_feature 1..22: note = chemically synthesized
  source 1..22: mol_type = other DNA
gtggatacactggttcctgtaa

SEQ ID NO: 50052 - DNA, 22 bp, synthetic construct
  misc_feature 1..22: note = chemically synthesized
  source 1..22: mol_type = other DNA
gttcctgtaagcagaagtggat

SEQ ID NO: 50053 - DNA, 22 bp, synthetic construct
  misc_feature 1..22: note = chemically synthesized
  source 1..22: mol_type = other DNA
ctgtaagcagaagtggatgagg

SEQ ID NO: 50054 - DNA, 22 bp, synthetic construct
  misc_feature 1..22: note = chemically synthesized
  source 1..22: mol_type = other DNA
taagcagaagtggatgagggtg

SEQ ID NO: 50055 - DNA, 22 bp, synthetic construct
  misc_feature 1..22: note = chemically synthesized
  source 1..22: mol_type = other DNA
ggtctgcagtcctggcacccca

SEQ ID NO: 50056 - DNA, 22 bp, synthetic construct
  misc_feature 1..22: note = chemically synthesized
  source 1..22: mol_type = other DNA
cagtcctggcaccccaggatgg

SEQ ID NO: 50057 - DNA, 22 bp, synthetic construct
  misc_feature 1..22: note = chemically synthesized
  source 1..22: mol_type = other DNA
gcaccccaggatgggggacacc

SEQ ID NO: 50058 - DNA, 22 bp, synthetic construct
  misc_feature 1..22: note = chemically synthesized
  source 1..22: mol_type = other DNA
ctttctgtttgcacagctcctc

SEQ ID NO: 50059 - DNA, 22 bp, synthetic construct
  misc_feature 1..22: note = chemically synthesized
  source 1..22: mol_type = other DNA
tttctgtttgcacagctcctct

SEQ ID NO: 50060 - DNA, 22 bp, synthetic construct
  misc_feature 1..22: note = chemically synthesized
  source 1..22: mol_type = other DNA
tctgtttgcacagctcctctgt

SEQ ID NO: 50061 - DNA, 22 bp, synthetic construct
  misc_feature 1..22: note = chemically synthesized
  source 1..22: mol_type = other DNA
ctgtttgcacagctcctctgtc

SEQ ID NO: 50062 - DNA, 22 bp, synthetic construct
  misc_feature 1..22: note = chemically synthesized
  source 1..22: mol_type = other DNA
tgtttgcacagctcctctgtct

SEQ ID NO: 50063 - DNA, 22 bp, synthetic construct
  misc_feature 1..22: note = chemically synthesized
  source 1..22: mol_type = other DNA
tttgcacagctcctctgtctgt

SEQ ID NO: 50064 - DNA, 22 bp, synthetic construct
  misc_feature 1..22: note = chemically synthesized
  source 1..22: mol_type = other DNA
gcacagctcctctgtctgtcgg

SEQ ID NO: 50065 - DNA, 22 bp, synthetic construct
  misc_feature 1..22: note = chemically synthesized
  source 1..22: mol_type = other DNA
cacagctcctctgtctgtcggg

SEQ ID NO: 50066 - DNA, 22 bp, synthetic construct
  misc_feature 1..22: note = chemically synthesized
  source 1..22: mol_type = other DNA
ctctgtctgtcgggggctcctg

SEQ ID NO: 50067 - DNA, 22 bp, synthetic construct
  misc_feature 1..22: note = chemically synthesized
  source 1..22: mol_type = other DNA
tgtctgtcgggggctcctgtct

SEQ ID NO: 50068 - DNA, 22 bp, synthetic construct
  misc_feature 1..22: note = chemically synthesized
  source 1..22: mol_type = other DNA
tctgtcgggggctcctgtctgt

SEQ ID NO: 50069 - DNA, 22 bp, synthetic construct
  misc_feature 1..22: note = chemically synthesized
  source 1..22: mol_type = other DNA
tcgggggctcctgtctgttgtc

SEQ ID NO: 50070 - DNA, 22 bp, synthetic construct
  misc_feature 1..22: note = chemically synthesized
  source 1..22: mol_type = other DNA
ctgtctgttgtctcctataagc

SEQ ID NO: 50071 - DNA, 22 bp, synthetic construct
  misc_feature 1..22: note = chemically synthesized
  source 1..22: mol_type = other DNA
tctgttgtctcctataagcctc

SEQ ID NO: 50072 - DNA, 22 bp, synthetic construct
  misc_feature 1..22: note = chemically synthesized
  source 1..22: mol_type = other DNA
ttgtctcctataagcctcacca

SEQ ID NO: 50073 - DNA, 22 bp, synthetic construct
  misc_feature 1..22: note = chemically synthesized
  source 1..22: mol_type = other DNA
tctcctataagcctcaccacct

SEQ ID NO: 50074 - DNA, 22 bp, synthetic construct
  misc_feature 1..22: note = chemically synthesized
  source 1..22: mol_type = other DNA
ctataagcctcaccacctctcc

SEQ ID NO: 50075 - DNA, 22 bp, synthetic construct
  misc_feature 1..22: note = chemically synthesized
  source 1..22: mol_type = other DNA
taagcctcaccacctctcctac

SEQ ID NO: 50076 - DNA, 22 bp, synthetic construct
  misc_feature 1..22: note = chemically synthesized
  source 1..22: mol_type = other DNA
accacctctcctactgcttggg

SEQ ID NO: 50077 - DNA, 22 bp, synthetic construct
  misc_feature 1..22: note = chemically synthesized
  source 1..22: mol_type = other DNA
tcctactgcttgggcatgcatc

SEQ ID NO: 50078 - DNA, 22 bp, synthetic construct
  misc_feature 1..22: note = chemically synthesized
  source 1..22: mol_type = other DNA
ctactgcttgggcatgcatctt

SEQ ID NO: 50079 - DNA, 22 bp, synthetic construct
  misc_feature 1..22: note = chemically synthesized
  source 1..22: mol_type = other DNA
ctgcttgggcatgcatctttct

SEQ ID NO: 50080 - DNA, 22 bp, synthetic construct
  misc_feature 1..22: note = chemically synthesized
  source 1..22: mol_type = other DNA
cttgggcatgcatctttctccc

SEQ ID NO: 50081 - DNA, 22 bp, synthetic construct
  misc_feature 1..22: note = chemically synthesized
  source 1..22: mol_type = other DNA
gggcatgcatctttctcccctt

SEQ ID NO: 50082 - DNA, 22 bp, synthetic construct
  misc_feature 1..22: note = chemically synthesized
  source 1..22: mol_type = other DNA
ggcatgcatctttctccccttc

SEQ ID NO: 50083 - DNA, 22 bp, synthetic construct
  misc_feature 1..22: note = chemically synthesized
  source 1..22: mol_type = other DNA
tctccccttctatagatgagga

SEQ ID NO: 50084 - DNA, 22 bp, synthetic construct
  misc_feature 1..22: note = chemically synthesized
  source 1..22: mol_type = other DNA
ctccccttctatagatgaggag

SEQ ID NO: 50085 - DNA, 22 bp, synthetic construct
  misc_feature 1..22: note = chemically synthesized
  source 1..22: mol_type = other DNA
tccccttctatagatgaggagg

SEQ ID NO: 50086 - DNA, 22 bp, synthetic construct
  misc_feature 1..22: note = chemically synthesized
  source 1..22: mol_type = other DNA
cccttctatagatgaggaggtt

SEQ ID NO: 50087 - DNA, 22 bp, synthetic construct
  misc_feature 1..22: note = chemically synthesized
  source 1..22: mol_type = other DNA
ctatagatgaggaggttaaggt

SEQ ID NO: 50088 - DNA, 22 bp, synthetic construct
  misc_feature 1..22: note = chemically synthesized
  source 1..22: mol_type = other DNA
tatagatgaggaggttaaggtc

SEQ ID NO: 50089 - DNA, 22 bp, synthetic construct
  misc_feature 1..22: note = chemically synthesized
  source 1..22: mol_type = other DNA
tagatgaggaggttaaggtcca

SEQ ID NO: 50090 - DNA, 22 bp, synthetic construct
  misc_feature 1..22: note = chemically synthesized
  source 1..22: mol_type = other DNA
aggtccagagaggggtggggag

SEQ ID NO: 50091 - DNA, 22 bp, synthetic construct
  misc_feature 1..22: note = chemically synthesized
  source 1..22: mol_type = other DNA
acattctccatcccctccagat

SEQ ID NO: 50092 - DNA, 22 bp, synthetic construct
  misc_feature 1..22: note = chemically synthesized
  source 1..22: mol_type = other DNA
tccatcccctccagatatgacc

SEQ ID NO: 50093 - DNA, 22 bp, synthetic construct
  misc_feature 1..22: note = chemically synthesized
  source 1..22: mol_type = other DNA
catcccctccagatatgaccag

SEQ ID NO: 50094 - DNA, 22 bp, synthetic construct
  misc_feature 1..22: note = chemically synthesized
  source 1..22: mol_type = other DNA
cagatatgaccaggaacagacc

SEQ ID NO: 50095 - DNA, 20 bp, synthetic construct
  misc_feature 1..20: note = chemically synthesized
  source 1..20: mol_type = other DNA
cgagcgagccgcgatgacaa

SEQ ID NO: 50096 - DNA, 20 bp, synthetic construct
  misc_feature 1..20: note = chemically synthesized
  source 1..20: mol_type = other DNA
tcccatcaacatttctgtgc

SEQ ID NO: 50097 - DNA, 20 bp, synthetic construct
  misc_feature 1..20: note = chemically synthesized
  source 1..20: mol_type = other DNA
tgctggactccttccactcg

SEQ ID NO: 50098 - DNA, 20 bp, synthetic construct
  misc_feature 1..20: note = chemically synthesized
  source 1..20: mol_type = other DNA
gctggactccttccactcgc

SEQ ID NO: 50099 - DNA, 20 bp, synthetic construct
  misc_feature 1..20: note = chemically synthesized
  source 1..20: mol_type = other DNA
ttccactcgcgggtcgtctc

SEQ ID NO: 50100 - DNA, 20 bp, synthetic construct
  misc_feature 1..20: note = chemically synthesized
  source 1..20: mol_type = other DNA
ccactcgcgggtcgtctcca

SEQ ID NO: 50101 - DNA, 20 bp, synthetic construct
  misc_feature 1..20: note = chemically synthesized
  source 1..20: mol_type = other DNA
cgcgggtcgtctccagagct

SEQ ID NO: 50102 - DNA, 20 bp, synthetic construct
  misc_feature 1..20: note = chemically synthesized
  source 1..20: mol_type = other DNA
gtctccagagctcagaaaat

SEQ ID NO: 50103 - DNA, 20 bp, synthetic construct
  misc_feature 1..20: note = chemically synthesized
  source 1..20: mol_type = other DNA
tctccagagctcagaaaatg

SEQ ID NO: 50104 - DNA, 20 bp, synthetic construct
  misc_feature 1..20: note = chemically synthesized
  source 1..20: mol_type = other DNA
agctcagaaaatgaggtgat

SEQ ID NO: 50105 - DNA, 20 bp, synthetic construct
  misc_feature 1..20: note = chemically synthesized
  source 1..20: mol_type = other DNA
tcagaaaatgaggtgatcag

SEQ ID NO: 50106 - DNA, 20 bp, synthetic construct
  misc_feature 1..20: note = chemically synthesized
  source 1..20: mol_type = other DNA
cagaaaatgaggtgatcagt

SEQ ID NO: 50107 - DNA, 20 bp, synthetic construct
  misc_feature 1..20: note = chemically synthesized
  source 1..20: mol_type = other DNA
aatgaggtgatcagtgggac

SEQ ID NO: 50108 - DNA, 20 bp, synthetic construct
  misc_feature 1..20: note = chemically synthesized
  source 1..20: mol_type = other DNA
aggtgatcagtgggacgagt

SEQ ID NO: 50109 - DNA, 20 bp, synthetic construct
  misc_feature 1..20: note = chemically synthesized
  source 1..20: mol_type = other DNA
ggtgatcagtgggacgagta

SEQ ID NO: 50110 - DNA, 20 bp, synthetic construct
  misc_feature 1..20: note = chemically synthesized
  source 1..20: mol_type = other DNA
gatcagtgggacgagtaagg

SEQ ID NO: 50111 - DNA, 20 bp, synthetic construct
  misc_feature 1..20: note = chemically synthesized
  source 1..20: mol_type = other DNA
atcagtgggacgagtaagga

SEQ ID NO: 50112 - DNA, 20 bp, synthetic construct
  misc_feature 1..20: note = chemically synthesized
  source 1..20: mol_type = other DNA
tcagtgggacgagtaaggaa

SEQ ID NO: 50113 - DNA, 20 bp, synthetic construct
  misc_feature 1..20: note = chemically synthesized
  source 1..20: mol_type = other DNA
cagtgggacgagtaaggaag

SEQ ID NO: 50114 - DNA, 20 bp, synthetic construct
  misc_feature 1..20: note = chemically synthesized
  source 1..20: mol_type = other DNA
agtgggacgagtaaggaagg

SEQ ID NO: 50115 - DNA, 20 bp, synthetic construct
  misc_feature 1..20: note = chemically synthesized
  source 1..20: mol_type = other DNA
gtgggacgagtaaggaaggg

SEQ ID NO: 50116 - DNA, 20 bp, synthetic construct
  misc_feature 1..20: note = chemically synthesized
  source 1..20: mol_type = other DNA
gacgagtaaggaaggggggt

SEQ ID NO: 50117 - DNA, 20 bp, synthetic construct
  misc_feature 1..20: note = chemically synthesized
  source 1..20: mol_type = other DNA
acgagtaaggaaggggggtt

SEQ ID NO: 50118 - DNA, 20 bp, synthetic construct
  misc_feature 1..20: note = chemically synthesized
  source 1..20: mol_type = other DNA
gagtaaggaaggggggttgg

SEQ ID NO: 50119 - DNA, 20 bp, synthetic construct
  misc_feature 1..20: note = chemically synthesized
  source 1..20: mol_type = other DNA
gtaaggaaggggggttggga

SEQ ID NO: 50120 - DNA, 20 bp, synthetic construct
  misc_feature 1..20: note = chemically synthesized
  source 1..20: mol_type = other DNA
taaggaaggggggttgggag

SEQ ID NO: 50121 - DNA, 20 bp, synthetic construct
  misc_feature 1..20: note = chemically synthesized
  source 1..20: mol_type = other DNA
aaggaaggggggttgggaga

SEQ ID NO: 50122 - DNA, 20 bp, synthetic construct
  misc_feature 1..20: note = chemically synthesized
  source 1..20: mol_type = other DNA
aggaaggggggttgggagag

SEQ ID NO: 50123 - DNA, 20 bp, synthetic construct
  misc_feature 1..20: note = chemically synthesized
  source 1..20: mol_type = other DNA
ggggttgggagaggggcgat

SEQ ID NO: 50124 - DNA, 20 bp, synthetic construct
  misc_feature 1..20: note = chemically synthesized
  source 1..20: mol_type = other DNA
gggttgggagaggggcgatt

SEQ ID NO: 50125 - DNA, 20 bp, synthetic construct
  misc_feature 1..20: note = chemically synthesized
  source 1..20: mol_type = other DNA
agaggggcgattgggcaacc

SEQ ID NO: 50126 - DNA, 20 bp, synthetic construct
  misc_feature 1..20: note = chemically synthesized
  source 1..20: mol_type = other DNA
gcaacccggctgcacaaaca

SEQ ID NO: 50127 - DNA, 20 bp, synthetic construct
  misc_feature 1..20: note = chemically synthesized
  source 1..20: mol_type = other DNA
caacccggctgcacaaacac

SEQ ID NO: 50128 - DNA, 20 bp, synthetic construct
  misc_feature 1..20: note = chemically synthesized
  source 1..20: mol_type = other DNA
acccggctgcacaaacacgg

SEQ ID NO: 50129 - DNA, 20 bp, synthetic construct
  misc_feature 1..20: note = chemically synthesized
  source 1..20: mol_type = other DNA
cccggctgcacaaacacggg

SEQ ID NO: 50130 - DNA, 20 bp, synthetic construct
  misc_feature 1..20: note = chemically synthesized
  source 1..20: mol_type = other DNA
tgcacaaacacgggaggtca

SEQ ID NO: 50131 - DNA, 20 bp, synthetic construct
  misc_feature 1..20: note = chemically synthesized
  source 1..20: mol_type = other DNA
gggaggtcaaagattgcgcc

SEQ ID NO: 50132 - DNA, 20 bp, synthetic construct
  misc_feature 1..20: note = chemically synthesized
  source 1..20: mol_type = other DNA
aagattgcgcccagcccgcc

SEQ ID NO: 50133 - DNA, 20 bp, synthetic construct
  misc_feature 1..20: note = chemically synthesized
  source 1..20: mol_type = other DNA
agattgcgcccagcccgccc

SEQ ID NO: 50134 - DNA, 20 bp, synthetic construct
  misc_feature 1..20: note = chemically synthesized
  source 1..20: mol_type = other DNA
tgcgcccagcccgcccaggc

SEQ ID NO: 50135 - DNA, 20 bp, synthetic construct
  misc_feature 1..20: note = chemically synthesized
  source 1..20: mol_type = other DNA
gcgcccagcccgcccaggcc

SEQ ID NO: 50136 - DNA, 20 bp, synthetic construct
  misc_feature 1..20: note = chemically synthesized
  source 1..20: mol_type = other DNA
cagcccgcccaggccgggaa

SEQ ID NO: 50137 - DNA, 20 bp, synthetic construct
  misc_feature 1..20: note = chemically synthesized
  source 1..20: mol_type = other DNA
cccaggccgggaatggaata

SEQ ID NO: 50138 - DNA, 20 bp, synthetic construct
  misc_feature 1..20: note = chemically synthesized
  source 1..20: mol_type = other DNA
ccaggccgggaatggaataa

SEQ ID NO: 50139 - DNA, 20 bp, synthetic construct
  misc_feature 1..20: note = chemically synthesized
  source 1..20: mol_type = other DNA
caggccgggaatggaataaa

SEQ ID NO: 50140 - DNA, 20 bp, synthetic construct
  misc_feature 1..20: note = chemically synthesized
  source 1..20: mol_type = other DNA
gggaatggaataaagggacg

SEQ ID NO: 50141 - DNA, 20 bp, synthetic construct
  misc_feature 1..20: note = chemically synthesized
  source 1..20: mol_type = other DNA
ggaatggaataaagggacgc

SEQ ID NO: 50142 - DNA, 20 bp, synthetic construct
  misc_feature 1..20: note = chemically synthesized
  source 1..20: mol_type = other DNA
gaatggaataaagggacgcg

SEQ ID NO: 50143 - DNA, 20 bp, synthetic construct
  misc_feature 1..20: note = chemically synthesized
  source 1..20: mol_type = other DNA
aataaagggacgcggggcgc

SEQ ID NO: 50144 - DNA, 20 bp, synthetic construct
  misc_feature 1..20: note = chemically synthesized
  source 1..20: mol_type = other DNA
taaagggacgcggggcgccg

SEQ ID NO: 50145 - DNA, 20 bp, synthetic construct
  misc_feature 1..20: note = chemically synthesized
  source 1..20: mol_type = other DNA
aaagggacgcggggcgccgg

SEQ ID NO: 50146 - DNA, 20 bp, synthetic construct
  misc_feature 1..20: note = chemically synthesized
  source 1..20: mol_type = other DNA
gcggggcgccggaggctgca

SEQ ID NO: 50147 - DNA, 20 bp, synthetic construct
  misc_feature 1..20: note = chemically synthesized
  source 1..20: mol_type = other DNA
gggcgccggaggctgcacag

SEQ ID NO: 50148 - DNA, 20 bp, synthetic construct
  misc_feature 1..20: note = chemically synthesized
  source 1..20: mol_type = other DNA
gccggaggctgcacagaagc

SEQ ID NO: 50149 - DNA, 20 bp, synthetic construct
  misc_feature 1..20: note = chemically synthesized
  source 1..20: mol_type = other DNA
gtccgactgtgctcgctgct

SEQ ID NO: 50150 - DNA, 20 bp, synthetic construct
  misc_feature 1..20: note = chemically synthesized
  source 1..20: mol_type = other DNA
tcgctgctcagcgccgcacc

SEQ ID NO: 50151 - DNA, 20 bp, synthetic construct
  misc_feature 1..20: note = chemically synthesized
  source 1..20: mol_type = other DNA
ctgctcagcgccgcacccgg

SEQ ID NO: 50152 - DNA, 20 bp, synthetic construct
  misc_feature 1..20: note = chemically synthesized
  source 1..20: mol_type = other DNA
cagcgccgcacccggaagat

SEQ ID NO: 50153 - DNA, 20 bp, synthetic construct
  misc_feature 1..20: note = chemically synthesized
  source 1..20: mol_type = other DNA
agcgccgcacccggaagatg

SEQ ID NO: 50154 - DNA, 20 bp, synthetic construct
  misc_feature 1..20: note = chemically synthesized
  source 1..20: mol_type = other DNA
ccggaagatgaggctcgccg

SEQ ID NO: 50155 - DNA, 20 bp, synthetic construct
  misc_feature 1..20: note = chemically synthesized
  source 1..20: mol_type = other DNA
cggaagatgaggctcgccgt

SEQ ID NO: 50156 - DNA, 20 bp, synthetic construct
  misc_feature 1..20: note = chemically synthesized
  source 1..20: mol_type = other DNA
gaagatgaggctcgccgtgg

SEQ ID NO: 50157 - DNA, 20 bp, synthetic construct
  misc_feature 1..20: note = chemically synthesized
  source 1..20: mol_type = other DNA
gctcgccgtgggagccctgc

SEQ ID NO: 50158 - DNA, 20 bp, synthetic construct
  misc_feature 1..20: note = chemically synthesized
  source 1..20: mol_type = other DNA
cctgctggtctgcgccgtcc

SEQ ID NO: 50159 - DNA, 20 bp, synthetic construct
  misc_feature 1..20: note = chemically synthesized
  source 1..20: mol_type = other DNA
ctgctggtctgcgccgtcct

SEQ ID NO: 50160 - DNA, 20 bp, synthetic construct
  misc_feature 1..20: note = chemically synthesized
  source 1..20: mol_type = other DNA
tggtctgcgccgtcctgggt

SEQ ID NO: 50161 - DNA, 20 bp, synthetic construct
  misc_feature 1..20: note = chemically synthesized
  source 1..20: mol_type = other DNA
tgcgccgtcctgggtgagtg

SEQ ID NO: 50162 - DNA, 20 bp, synthetic construct
  misc_feature 1..20: note = chemically synthesized
  source 1..20: mol_type = other DNA
gcgccgtcctgggtgagtgc

SEQ ID NO: 50163 - DNA, 20 bp, synthetic construct
  misc_feature 1..20: note = chemically synthesized
  source 1..20: mol_type = other DNA
gtcctgggtgagtgcgggca

SEQ ID NO: 50164 - DNA, 20 bp, synthetic construct
  misc_feature 1..20: note = chemically synthesized
  source 1..20: mol_type = other DNA
tcctgggtgagtgcgggcac

SEQ ID NO: 50165 - DNA, 20 bp, synthetic construct
  misc_feature 1..20: note = chemically synthesized
  source 1..20: mol_type = other DNA
cctgggtgagtgcgggcacg

SEQ ID NO: 50166 - DNA, 20 bp, synthetic construct
  misc_feature 1..20: note = chemically synthesized
  source 1..20: mol_type = other DNA
gggtgagtgcgggcacgggg

SEQ ID NO: 50167 - DNA, 20 bp, synthetic construct
  misc_feature 1..20: note = chemically synthesized
  source 1..20: mol_type = other DNA
gcgggcacggggtagcaccg

SEQ ID NO: 50168 - DNA, 20 bp, synthetic construct
  misc_feature 1..20: note = chemically synthesized
  source 1..20: mol_type = other DNA
gggcacggggtagcaccgca

SEQ ID NO: 50169 - DNA, 20 bp, synthetic construct
  misc_feature 1..20: note = chemically synthesized
  source 1..20: mol_type = other DNA
gggtagcaccgcagagtcgc

SEQ ID NO: 50170 - DNA, 20 bp, synthetic construct
  misc_feature 1..20: note = chemically synthesized
  source 1..20: mol_type = other DNA
cccgcgcgttccctgcaacc

SEQ ID NO: 50171 - DNA, 20 bp, synthetic construct
  misc_feature 1..20: note = chemically synthesized
  source 1..20: mol_type = other DNA
ccgcgcgttccctgcaaccc

SEQ ID NO: 50172 - DNA, 20 bp, synthetic construct
  misc_feature 1..20: note = chemically synthesized
  source 1..20: mol_type = other DNA
cgcgttccctgcaacccggg

SEQ ID NO: 50173 - DNA, 20 bp, synthetic construct
  misc_feature 1..20: note = chemically synthesized
  source 1..20: mol_type = other DNA
caacccgggcggccaccgcg

SEQ ID NO: 50174 - DNA, 20 bp, synthetic construct
  misc_feature 1..20: note = chemically synthesized
  source 1..20: mol_type = other DNA
gcctgcatgcactccgcgct

SEQ ID NO: 50175 - DNA, 20 bp, synthetic construct
  misc_feature 1..20: note = chemically synthesized
  source 1..20: mol_type = other DNA
cctgcatgcactccgcgctc

SEQ ID NO: 50176 - DNA, 20 bp, synthetic construct
  misc_feature 1..20: note = chemically synthesized
  source 1..20: mol_type = other DNA
catgcactccgcgctcaggc

SEQ ID NO: 50177 - DNA, 20 bp, synthetic construct
  misc_feature 1..20: note = chemically synthesized
  source 1..20: mol_type = other DNA
gcactccgcgctcaggctgg

SEQ ID NO: 50178 - DNA, 20 bp, synthetic construct
  misc_feature 1..20: note = chemically synthesized
  source 1..20: mol_type = other DNA
ccgcgctcaggctggaagcc

SEQ ID NO: 50179 - DNA, 20 bp, synthetic construct
  misc_feature 1..20: note = chemically synthesized
  source 1..20: mol_type = other DNA
cgcgctcaggctggaagcct

SEQ ID NO: 50180 - DNA, 20 bp, synthetic construct
  misc_feature 1..20: note = chemically synthesized
  source 1..20: mol_type = other DNA
aggctggaagcctgggtgtc

SEQ ID NO: 50181 - DNA, 20 bp, synthetic construct
  misc_feature 1..20: note = chemically synthesized
  source 1..20: mol_type = other DNA
ggctggaagcctgggtgtct

SEQ ID NO: 50182 - DNA, 20 bp, synthetic construct
  misc_feature 1..20: note = chemically synthesized
  source 1..20: mol_type = other DNA
gcctctctacgccccacccc

SEQ ID NO: 50183 - DNA, 20 bp, synthetic construct
  misc_feature 1..20: note = chemically synthesized
  source 1..20: mol_type = other DNA
ccccacccctggcctttgct

SEQ ID NO: 50184 - DNA, 20 bp, synthetic construct
  misc_feature 1..20: note = chemically synthesized
  source 1..20: mol_type = other DNA
cccacccctggcctttgctt

SEQ ID NO: 50185 - DNA, 20 bp, synthetic construct
  misc_feature 1..20: note = chemically synthesized
  source 1..20: mol_type = other DNA
ctggcctttgcttgggcttc

SEQ ID NO: 50186 - DNA, 20 bp, synthetic construct
  misc_feature 1..20: note = chemically synthesized
  source 1..20: mol_type = other DNA
tccccctcctcctctttgtc

SEQ ID NO: 50187 - DNA, 20 bp, synthetic construct
  misc_feature 1..20: note = chemically synthesized
  source 1..20: mol_type = other DNA
tctttgtccagtaaatcttg

SEQ ID NO: 50188 - DNA, 20 bp, synthetic construct
  misc_feature 1..20: note = chemically synthesized
  source 1..20: mol_type = other DNA
ttgtccagtaaatcttgcag

SEQ ID NO: 50189 - DNA, 20 bp, synthetic construct
  misc_feature 1..20: note = chemically synthesized
  source 1..20: mol_type = other DNA
agcagtgaaatacaataaat

SEQ ID NO: 50190 - DNA, 20 bp, synthetic construct
  misc_feature 1..20: note = chemically synthesized
  source 1..20: mol_type = other DNA
cagtgaaatacaataaatca

SEQ ID NO: 50191 - DNA, 20 bp, synthetic construct
  misc_feature 1..20: note = chemically synthesized
  source 1..20: mol_type = other DNA
taaatcagagcacgtctaac

SEQ ID NO: 50192 - DNA, 20 bp, synthetic construct
  misc_feature 1..20: note = chemically synthesized
  source 1..20: mol_type = other DNA
aaatcagagcacgtctaacc

SEQ ID NO: 50193 - DNA, 20 bp, synthetic construct
  misc_feature 1..20: note = chemically synthesized
  source 1..20: mol_type = other DNA
ctttgctgctgcctcttgtc

SEQ ID NO: 50194 - DNA, 20 bp, synthetic construct
  misc_feature 1..20: note = chemically synthesized
  source 1..20: mol_type = other DNA
cttgtcaagtccgaactcct

SEQ ID NO: 50195 - DNA, 20 bp, synthetic construct
  misc_feature 1..20: note = chemically synthesized
  source 1..20: mol_type = other DNA
caagtccgaactccttagca

SEQ ID NO: 50196 - DNA, 20 bp, synthetic construct
  misc_feature 1..20: note = chemically synthesized
  source 1..20: mol_type = other DNA
aactccttagcatggcattc

SEQ ID NO: 50197 - DNA, 20 bp, synthetic construct
  misc_feature 1..20: note = chemically synthesized
  source 1..20: mol_type = other DNA
actccttagcatggcattca

SEQ ID NO: 50198 - DNA, 20 bp, synthetic construct
  misc_feature 1..20: note = chemically synthesized
  source 1..20: mol_type = other DNA
gcatggcattcaaggcctcc

SEQ ID NO: 50199 - DNA, 20 bp, synthetic construct
  misc_feature 1..20: note = chemically synthesized
  source 1..20: mol_type = other DNA
catggcattcaaggcctccc

SEQ ID NO: 50200 - DNA, 20 bp, synthetic construct
  misc_feature 1..20: note = chemically synthesized
  source 1..20: mol_type = other DNA
gggtctgaccattccccttt

SEQ ID NO: 50201 - DNA, 20 bp, synthetic construct
  misc_feature 1..20: note = chemically synthesized
  source 1..20: mol_type = other DNA
gtctgaccattcccctttca

SEQ ID NO: 50202 - DNA, 20 bp, synthetic construct
  misc_feature 1..20: note = chemically synthesized
  source 1..20: mol_type = other DNA
tctgaccattcccctttcag

SEQ ID NO: 50203 - DNA, 20 bp, synthetic construct
  misc_feature 1..20: note = chemically synthesized
  source 1..20: mol_type = other DNA
tttcagaggctgatgtcccc

SEQ ID NO: 50204 - DNA, 20 bp, synthetic construct
  misc_feature 1..20: note = chemically synthesized
  source 1..20: mol_type = other DNA
ttcagaggctgatgtcccct

SEQ ID NO: 50205 - DNA, 20 bp, synthetic construct
  misc_feature 1..20: note = chemically synthesized
  source 1..20: mol_type = other DNA
ctgatgtcccctgggtgccc

SEQ ID NO: 50206 - DNA, 20 bp, synthetic construct
  misc_feature 1..20: note = chemically synthesized
  source 1..20: mol_type = other DNA
tgatgtcccctgggtgccct

SEQ ID NO: 50207 - DNA, 20 bp, synthetic construct
  misc_feature 1..20: note = chemically synthesized
  source 1..20: mol_type = other DNA
atgtcccctgggtgccctgg

SEQ ID NO: 50208 - DNA, 20 bp, synthetic construct
  misc_feature 1..20: note = chemically synthesized
  source 1..20: mol_type = other DNA
cctgggtgccctgggagctg

SEQ ID NO: 50209 - DNA, 20 bp, synthetic construct
  misc_feature 1..20: note = chemically synthesized
  source 1..20: mol_type = other DNA
ggagctgtagatgtcctgcc

SEQ ID NO: 50210 - DNA, 20 bp, synthetic construct
  misc_feature 1..20: note = chemically synthesized
  source 1..20: mol_type = other DNA
gagctgtagatgtcctgcca

SEQ ID NO: 50211 - DNA, 20 bp, synthetic construct
  misc_feature 1..20: note = chemically synthesized
  source 1..20: mol_type = other DNA
ctgtagatgtcctgccaagg

SEQ ID NO: 50212 - DNA, 20 bp, synthetic construct
  misc_feature 1..20: note = chemically synthesized
  source 1..20: mol_type = other DNA
tagatgtcctgccaaggaag

SEQ ID NO: 50213 - DNA, 20 bp, synthetic construct
  misc_feature 1..20: note = chemically synthesized
  source 1..20: mol_type = other DNA
gccaaggaagcggtgccatc

SEQ ID NO: 50214 - DNA, 20 bp, synthetic construct
  misc_feature 1..20: note = chemically synthesized
  source 1..20: mol_type = other DNA
aaggaagcggtgccatcgag

SEQ ID NO: 50215 - DNA, 20 bp, synthetic construct
  misc_feature 1..20: note = chemically synthesized
  source 1..20: mol_type = other DNA
aagcggtgccatcgagcggt

SEQ ID NO: 50216 - DNA, 20 bp, synthetic construct
  misc_feature 1..20: note = chemically synthesized
  source 1..20: mol_type = other DNA
gcggtgccatcgagcggtca

SEQ ID NO: 50217 - DNA, 20 bp, synthetic construct
  misc_feature 1..20: note = chemically synthesized
  source 1..20: mol_type = other DNA
gccatcgagcggtcagagca

SEQ ID NO: 50218 - DNA, 20 bp, synthetic construct
  misc_feature 1..20: note = chemically synthesized
  source 1..20: mol_type = other DNA
ccatcgagcggtcagagcat

SEQ ID NO: 50219 - DNA, 20 bp, synthetic construct
  misc_feature 1..20: note = chemically synthesized
  source 1..20: mol_type = other DNA
catcgagcggtcagagcatg

SEQ ID NO: 50220 - DNA, 20 bp, synthetic construct
  misc_feature 1..20: note = chemically synthesized
  source 1..20: mol_type = other DNA
cggtcagagcatggggtttg

SEQ ID NO: 50221 - DNA, 20 bp, synthetic construct
  misc_feature 1..20: note = chemically synthesized
  source 1..20: mol_type = other DNA
cagagcatggggtttgaagc

SEQ ID NO: 50222 - DNA, 20 bp, synthetic construct
  misc_feature 1..20: note = chemically synthesized
  source 1..20: mol_type = other DNA
gggtttgaagccagacttct

SEQ ID NO: 50223 - DNA, 20 bp, synthetic construct
  misc_feature 1..20: note = chemically synthesized
  source 1..20: mol_type = other DNA
aagccagacttcttggatcc

SEQ ID NO: 50224 - DNA, 20 bp, synthetic construct
  misc_feature 1..20: note = chemically synthesized
  source 1..20: mol_type = other DNA
gacttcttggatccaagtcc

SEQ ID NO: 50225 - DNA, 20 bp, synthetic construct
  misc_feature 1..20: note = chemically synthesized
  source 1..20: mol_type = other DNA
tcttggatccaagtcctggc

SEQ ID NO: 50226 - DNA, 20 bp, synthetic construct
  misc_feature 1..20: note = chemically synthesized
  source 1..20: mol_type = other DNA
agtcctggccggctcctcac

SEQ ID NO: 50227 - DNA, 20 bp, synthetic construct
  misc_feature 1..20: note = chemically synthesized
  source 1..20: mol_type = other DNA
gtcctggccggctcctcacc

SEQ ID NO: 50228 - DNA, 20 bp, synthetic construct
  misc_feature 1..20: note = chemically synthesized
  source 1..20: mol_type = other DNA
tcctggccggctcctcacca

SEQ ID NO: 50229 - DNA, 20 bp, synthetic construct
  misc_feature 1..20: note = chemically synthesized
  source 1..20: mol_type = other DNA
ctggccggctcctcaccagg

SEQ ID NO: 50230 - DNA, 20 bp, synthetic construct
  misc_feature 1..20: note = chemically synthesized
  source 1..20: mol_type = other DNA
tggccggctcctcaccaggg

SEQ ID NO: 50231 - DNA, 20 bp, synthetic construct
  misc_feature 1..20: note = chemically synthesized
  source 1..20: mol_type = other DNA
ggccggctcctcaccaggga

SEQ ID NO: 50232 - DNA, 20 bp, synthetic construct
  misc_feature 1..20: note = chemically synthesized
  source 1..20: mol_type = other DNA
gccggctcctcaccagggag

SEQ ID NO: 50233 - DNA, 20 bp, synthetic construct
  misc_feature 1..20: note = chemically synthesized
  source 1..20: mol_type = other DNA
ccggctcctcaccagggagg

SEQ ID NO: 50234 - DNA, 20 bp, synthetic construct
  misc_feature 1..20: note = chemically synthesized
  source 1..20: mol_type = other DNA
caccagggagggggtcatca

SEQ ID NO: 50235 - DNA, 20 bp, synthetic construct
  misc_feature 1..20: note = chemically synthesized
  source 1..20: mol_type = other DNA
gggtcatcacagcacttgcc

SEQ ID NO: 50236 - DNA, 20 bp, synthetic construct
  misc_feature 1..20: note = chemically synthesized
  source 1..20: mol_type = other DNA
ggtcatcacagcacttgcct

SEQ ID NO: 50237 - DNA, 20 bp, synthetic construct
  misc_feature 1..20: note = chemically synthesized
  source 1..20: mol_type = other DNA
tcatcacagcacttgcctgg

SEQ ID NO: 50238 - DNA, 20 bp, synthetic construct
  misc_feature 1..20: note = chemically synthesized
  source 1..20: mol_type = other DNA
catcacagcacttgcctggg

SEQ ID NO: 50239 - DNA, 20 bp, synthetic construct
  misc_feature 1..20: note = chemically synthesized
  source 1..20: mol_type = other DNA
atcacagcacttgcctggga

SEQ ID NO: 50240 - DNA, 20 bp, synthetic construct
  misc_feature 1..20: note = chemically synthesized
  source 1..20: mol_type = other DNA
cttgcctgggagggtcaaat

SEQ ID NO: 50241 - DNA, 20 bp, synthetic construct
  misc_feature 1..20: note = chemically synthesized
  source 1..20: mol_type = other DNA
ttgcctgggagggtcaaatg

SEQ ID NO: 50242 - DNA, 20 bp, synthetic construct
  misc_feature 1..20: note = chemically synthesized
  source 1..20: mol_type = other DNA
tgcctgggagggtcaaatga

SEQ ID NO: 50243 - DNA, 20 bp, synthetic construct
  misc_feature 1..20: note = chemically synthesized
  source 1..20: mol_type = other DNA
tgggagggtcaaatgagggt

SEQ ID NO: 50244 - DNA, 20 bp, synthetic construct
  misc_feature 1..20: note = chemically synthesized
  source 1..20: mol_type = other DNA
agggtcaaatgagggtcagc

SEQ ID NO: 50245 - DNA, 20 bp, synthetic construct
  misc_feature 1..20: note = chemically synthesized
  source 1..20: mol_type = other DNA
gggtcaaatgagggtcagcg

SEQ ID NO: 50246 - DNA, 20 bp, synthetic construct
  misc_feature 1..20: note = chemically synthesized
  source 1..20: mol_type = other DNA
tcaaatgagggtcagcgagg

SEQ ID NO: 50247 - DNA, 20 bp, synthetic construct
  misc_feature 1..20: note = chemically synthesized
  source 1..20: mol_type = other DNA
aatgagggtcagcgaggtgg

SEQ ID NO: 50248 - DNA, 20 bp, synthetic construct
  misc_feature 1..20: note = chemically synthesized
  source 1..20: mol_type = other DNA
tcagcgaggtggcagatgct

SEQ ID NO: 50249 - DNA, 20 bp, synthetic construct
  misc_feature 1..20: note = chemically synthesized
  source 1..20: mol_type = other DNA
aggtggcagatgctgagtac

SEQ ID NO: 50250 - DNA, 20 bp, synthetic construct
  misc_feature 1..20: note = chemically synthesized
  source 1..20: mol_type = other DNA
tggcagatgctgagtaccag

SEQ ID NO: 50251 - DNA, 20 bp, synthetic construct
  misc_feature 1..20: note = chemically synthesized
  source 1..20: mol_type = other DNA
cagatgctgagtaccagtgg

SEQ ID NO: 50252 - DNA, 20 bp, synthetic construct
  misc_feature 1..20: note = chemically synthesized
  source 1..20: mol_type = other DNA
atgttgcacacatcctgcta

SEQ ID NO: 50253 - DNA, 20 bp, synthetic construct
  misc_feature 1..20: note = chemically synthesized
  source 1..20: mol_type = other DNA
tgttgcacacatcctgctat

SEQ ID NO: 50254 - DNA, 20 bp, synthetic construct
  misc_feature 1..20: note = chemically synthesized
  source 1..20: mol_type = other DNA
gttgcacacatcctgctatg

SEQ ID NO: 50255 - DNA, 20 bp, synthetic construct
  misc_feature 1..20: note = chemically synthesized
  source 1..20: mol_type = other DNA
gcacacatcctgctatgggg

SEQ ID NO: 50256 - DNA, 20 bp, synthetic construct
  misc_feature 1..20: note = chemically synthesized
  source 1..20: mol_type = other DNA
cacatcctgctatggggcag

SEQ ID NO: 50257 - DNA, 20 bp, synthetic construct
  misc_feature 1..20: note = chemically synthesized
  source 1..20: mol_type = other DNA
gccacactccccgacctcct

SEQ ID NO: 50258 - DNA, 20 bp, synthetic construct
  misc_feature 1..20: note = chemically synthesized
  source 1..20: mol_type = other DNA
ccacactccccgacctcctg

SEQ ID NO: 50259 - DNA, 20 bp, synthetic construct
  misc_feature 1..20: note = chemically synthesized
  source 1..20: mol_type = other DNA
cactccccgacctcctgagg

SEQ ID NO: 50260 - DNA, 20 bp, synthetic construct
  misc_feature 1..20: note = chemically synthesized
  source 1..20: mol_type = other DNA
actccccgacctcctgaggt

SEQ ID NO: 50261 - DNA, 20 bp, synthetic construct
  misc_feature 1..20: note = chemically synthesized
  source 1..20: mol_type = other DNA
ctccccgacctcctgaggtg

SEQ ID NO: 50262 - DNA, 20 bp, synthetic construct
  misc_feature 1..20: note = chemically synthesized
  source 1..20: mol_type = other DNA
taacttctgcctgccattca

SEQ ID NO: 50263 - DNA, 20 bp, synthetic construct
  misc_feature 1..20: note = chemically synthesized
  source 1..20: mol_type = other DNA
aacttctgcctgccattcat

SEQ ID NO: 50264 - DNA, 20 bp, synthetic construct
  misc_feature 1..20: note = chemically synthesized
  source 1..20: mol_type = other DNA
acttctgcctgccattcatg

SEQ ID NO: 50265 - DNA, 20 bp, synthetic construct
  misc_feature 1..20: note = chemically synthesized
  source 1..20: mol_type = other DNA
tggggcatttgtcacactgt

SEQ ID NO: 50266 - DNA, 20 bp, synthetic construct
  misc_feature 1..20: note = chemically synthesized
  source 1..20: mol_type = other DNA
ggggcatttgtcacactgtt

SEQ ID NO: 50267 - DNA, 20 bp, synthetic construct
  misc_feature 1..20: note = chemically synthesized
  source 1..20: mol_type = other DNA
gggcatttgtcacactgttg

SEQ ID NO: 50268 - DNA, 20 bp, synthetic construct
  misc_feature 1..20: note = chemically synthesized
  source 1..20: mol_type = other DNA
actgttggggcttccacgtt

SEQ ID NO: 50269 - DNA, 20 bp, synthetic construct
  misc_feature 1..20: note = chemically synthesized
  source 1..20: mol_type = other DNA
gtttagttttctctccccat

SEQ ID NO: 50270 - DNA, 20 bp, synthetic construct
  misc_feature 1..20: note = chemically synthesized
  source 1..20: mol_type = other DNA
agttttctctccccataagc

SEQ ID NO: 50271 - DNA, 20 bp, synthetic construct
  misc_feature 1..20: note = chemically synthesized
  source 1..20: mol_type = other DNA
ccataagctagcaattcctt

SEQ ID NO: 50272 - DNA, 20 bp, synthetic construct
  misc_feature 1..20: note = chemically synthesized
  source 1..20: mol_type = other DNA
ataagctagcaattccttga

SEQ ID NO: 50273 - DNA, 20 bp, synthetic construct
  misc_feature 1..20: note = chemically synthesized
  source 1..20: mol_type = other DNA
aagctagcaattccttgaga

SEQ ID NO: 50274 - DNA, 20 bp, synthetic construct
  misc_feature 1..20: note = chemically synthesized
  source 1..20: mol_type = other DNA
agctagcaattccttgagag

SEQ ID NO: 50275 - DNA, 20 bp, synthetic construct
  misc_feature 1..20: note = chemically synthesized
  source 1..20: mol_type = other DNA
tacttgcctttatccccgca

SEQ ID NO: 50276 - DNA, 20 bp, synthetic construct
  misc_feature 1..20: note = chemically synthesized
  source 1..20: mol_type = other DNA
cttgcctttatccccgcaca

SEQ ID NO: 50277 - DNA, 20 bp, synthetic construct
  misc_feature 1..20: note = chemically synthesized
  source 1..20: mol_type = other DNA
tccccgcacagagcacttca

SEQ ID NO: 50278 - DNA, 20 bp, synthetic construct
  misc_feature 1..20: note = chemically synthesized
  source 1..20: mol_type = other DNA
ccccgcacagagcacttcac

SEQ ID NO: 50279 - DNA, 20 bp, synthetic construct
  misc_feature 1..20: note = chemically synthesized
  source 1..20: mol_type = other DNA
gagcacttcacaggctgtgc

SEQ ID NO: 50280 - DNA, 20 bp, synthetic construct
  misc_feature 1..20: note = chemically synthesized
  source 1..20: mol_type = other DNA
agcacttcacaggctgtgca

SEQ ID NO: 50281 - DNA, 20 bp, synthetic construct
  misc_feature 1..20: note = chemically synthesized
  source 1..20: mol_type = other DNA
gtgcaaggtaatgctccact

SEQ ID NO: 50282 - DNA, 20 bp, synthetic construct
  misc_feature 1..20: note = chemically synthesized
  source 1..20: mol_type = other DNA
tgcaaggtaatgctccactg

SEQ ID NO: 50283 - DNA, 20 bp, synthetic construct
  misc_feature 1..20: note = chemically synthesized
  source 1..20: mol_type = other DNA
tgaggacacattctcgccta

SEQ ID NO: 50284 - DNA, 20 bp, synthetic construct
  misc_feature 1..20: note = chemically synthesized
  source 1..20: mol_type = other DNA
gaggacacattctcgcctat

SEQ ID NO: 50285 - DNA, 20 bp, synthetic construct
  misc_feature 1..20: note = chemically synthesized
  source 1..20: mol_type = other DNA
attctcgcctatgggaactc

SEQ ID NO: 50286 - DNA, 20 bp, synthetic construct
  misc_feature 1..20: note = chemically synthesized
  source 1..20: mol_type = other DNA
tctcgcctatgggaactctg

SEQ ID NO: 50287 - DNA, 20 bp, synthetic construct
  misc_feature 1..20: note = chemically synthesized
  source 1..20: mol_type = other DNA
ctcgcctatgggaactctgg

SEQ ID NO: 50288 - DNA, 20 bp, synthetic construct
  misc_feature 1..20: note = chemically synthesized
  source 1..20: mol_type = other DNA
gcctatgggaactctggagg

SEQ ID NO: 50289 - DNA, 20 bp, synthetic construct
  misc_feature 1..20: note = chemically synthesized
  source 1..20: mol_type = other DNA
cctatgggaactctggaggc

SEQ ID NO: 50290 - DNA, 20 bp, synthetic construct
  misc_feature 1..20: note = chemically synthesized
  source 1..20: mol_type = other DNA
ctatgggaactctggaggca

SEQ ID NO: 50291 - DNA, 20 bp, synthetic construct
  misc_feature 1..20: note = chemically synthesized
  source 1..20: mol_type = other DNA
actctggaggcagggctttg

SEQ ID NO: 50292 - DNA, 20 bp, synthetic construct
  misc_feature 1..20: note = chemically synthesized
  source 1..20: mol_type = other DNA
tctggaggcagggctttgtg

SEQ ID NO: 50293 - DNA, 20 bp, synthetic construct
  misc_feature 1..20: note = chemically synthesized
  source 1..20: mol_type = other DNA
ctggaggcagggctttgtgg

SEQ ID NO: 50294 - DNA, 20 bp, synthetic construct
  misc_feature 1..20: note = chemically synthesized
  source 1..20: mol_type = other DNA
tggaggcagggctttgtgga

SEQ ID NO: 50295 - DNA, 20 bp, synthetic construct
  misc_feature 1..20: note = chemically synthesized
  source 1..20: mol_type = other DNA
ggaggcagggctttgtggag

SEQ ID NO: 50296 - DNA, 20 bp, synthetic construct
  misc_feature 1..20: note = chemically synthesized
  source 1..20: mol_type = other DNA
gctttgtggaggggctgcca

SEQ ID NO: 50297 - DNA, 20 bp, synthetic construct
  misc_feature 1..20: note = chemically synthesized
  source 1..20: mol_type = other DNA
ctttgtggaggggctgccac

SEQ ID NO: 50298 - DNA, 20 bp, synthetic construct
  misc_feature 1..20: note = chemically synthesized
  source 1..20: mol_type = other DNA
cacaggcttatgttgcctcc

SEQ ID NO: 50299 - DNA, 20 bp, synthetic construct
  misc_feature 1..20: note = chemically synthesized
  source 1..20: mol_type = other DNA
acaggcttatgttgcctcct

SEQ ID NO: 50300 - DNA, 20 bp, synthetic construct
  misc_feature 1..20: note = chemically synthesized
  source 1..20: mol_type = other DNA
ttgcctcctaggatttccca

SEQ ID NO: 50301 - DNA, 20 bp, synthetic construct
  misc_feature 1..20: note = chemically synthesized
  source 1..20: mol_type = other DNA
tgcctcctaggatttcccat

SEQ ID NO: 50302 - DNA, 20 bp, synthetic construct
  misc_feature 1..20: note = chemically synthesized
  source 1..20: mol_type = other DNA
cctaggatttcccatgggcc

SEQ ID NO: 50303 - DNA, 20 bp, synthetic construct
  misc_feature 1..20: note = chemically synthesized
  source 1..20: mol_type = other DNA
taggatttcccatgggccaa

SEQ ID NO: 50304 - DNA, 20 bp, synthetic construct
  misc_feature 1..20: note = chemically synthesized
  source 1..20: mol_type = other DNA
aggatttcccatgggccaag

SEQ ID NO: 50305 - DNA, 20 bp, synthetic construct
  misc_feature 1..20: note = chemically synthesized
  source 1..20: mol_type = other DNA
ggatttcccatgggccaaga

SEQ ID NO: 50306 - DNA, 20 bp, synthetic construct
  misc_feature 1..20: note = chemically synthesized
  source 1..20: mol_type = other DNA
ccatgggccaagagggaaaa

SEQ ID NO: 50307 - DNA, 20 bp, synthetic construct
  misc_feature 1..20: note = chemically synthesized
  source 1..20: mol_type = other DNA
catgggccaagagggaaaat

SEQ ID NO: 50308 - DNA, 20 bp, synthetic construct
  misc_feature 1..20: note = chemically synthesized
  source 1..20: mol_type = other DNA
atgggccaagagggaaaatg

SEQ ID NO: 50309 - DNA, 20 bp, synthetic construct
  misc_feature 1..20: note = chemically synthesized
  source 1..20: mol_type = other DNA
tgggccaagagggaaaatgg

SEQ ID NO: 50310 - DNA, 20 bp, synthetic construct
  misc_feature 1..20: note = chemically synthesized
  source 1..20: mol_type = other DNA
agagggaaaatgggggtcgc

SEQ ID NO: 50311 - DNA, 20 bp, synthetic construct
  misc_feature 1..20: note = chemically synthesized
  source 1..20: mol_type = other DNA
gagggaaaatgggggtcgct

SEQ ID NO: 50312 - DNA, 20 bp, synthetic construct
  misc_feature 1..20: note = chemically synthesized
  source 1..20: mol_type = other DNA
agggaaaatgggggtcgctg

SEQ ID NO: 50313 - DNA, 20 bp, synthetic construct
  misc_feature 1..20: note = chemically synthesized
  source 1..20: mol_type = other DNA
gaaaatgggggtcgctgggg

SEQ ID NO: 50314 - DNA, 20 bp, synthetic construct
  misc_feature 1..20: note = chemically synthesized
  source 1..20: mol_type = other DNA
gtcgctggggtggccatccc

SEQ ID NO: 50315 - DNA, 20 bp, synthetic construct
  misc_feature 1..20: note = chemically synthesized
  source 1..20: mol_type = other DNA
gctggggtggccatccctgg

SEQ ID NO: 50316 - DNA, 20 bp, synthetic construct
  misc_feature 1..20: note = chemically synthesized
  source 1..20: mol_type = other DNA
tggcccctcctcatgcatcc

SEQ ID NO: 50317 - DNA, 20 bp, synthetic construct
  misc_feature 1..20: note = chemically synthesized
  source 1..20: mol_type = other DNA
gcccctcctcatgcatcctg

SEQ ID NO: 50318 - DNA, 20 bp, synthetic construct
  misc_feature 1..20: note = chemically synthesized
  source 1..20: mol_type = other DNA
ccctcctcatgcatcctgga

SEQ ID NO: 50319 - DNA, 20 bp, synthetic construct
  misc_feature 1..20: note = chemically synthesized
  source 1..20: mol_type = other DNA
tcatgcatcctggagagctg

SEQ ID NO: 50320 - DNA, 20 bp, synthetic construct
  misc_feature 1..20: note = chemically synthesized
  source 1..20: mol_type = other DNA
catgcatcctggagagctgt

SEQ ID NO: 50321 - DNA, 20 bp, synthetic construct
  misc_feature 1..20: note = chemically synthesized
  source 1..20: mol_type = other DNA
agctgtgggcctcctctcca

SEQ ID NO: 50322 - DNA, 20 bp, synthetic construct
  misc_feature 1..20: note = chemically synthesized
  source 1..20: mol_type = other DNA
gctgtgggcctcctctccac

SEQ ID NO: 50323 - DNA, 20 bp, synthetic construct
  misc_feature 1..20: note = chemically synthesized
  source 1..20: mol_type = other DNA
cctcctctccacaggctttg

SEQ ID NO: 50324 - DNA, 20 bp, synthetic construct
  misc_feature 1..20: note = chemically synthesized
  source 1..20: mol_type = other DNA
caggctttgtggatcttctt

SEQ ID NO: 50325 - DNA, 20 bp, synthetic construct
  misc_feature 1..20: note = chemically synthesized
  source 1..20: mol_type = other DNA
ggctttgtggatcttcttca

SEQ ID NO: 50326 - DNA, 20 bp, synthetic construct
  misc_feature 1..20: note = chemically synthesized
  source 1..20: mol_type = other DNA
ttgtggatcttcttcagagc

SEQ ID NO: 50327 - DNA, 20 bp, synthetic construct
  misc_feature 1..20: note = chemically synthesized
  source 1..20: mol_type = other DNA
ggatcttcttcagagccagt

SEQ ID NO: 50328 - DNA, 20 bp, synthetic construct
  misc_feature 1..20: note = chemically synthesized
  source 1..20: mol_type = other DNA
cttcttcagagccagtgagt

SEQ ID NO: 50329 - DNA, 20 bp, synthetic construct
  misc_feature 1..20: note = chemically synthesized
  source 1..20: mol_type = other DNA
ccagtgagtcagccttgctg

SEQ ID NO: 50330 - DNA, 20 bp, synthetic construct
  misc_feature 1..20: note = chemically synthesized
  source 1..20: mol_type = other DNA
gtgagtcagccttgctgtgg

SEQ ID NO: 50331 - DNA, 20 bp, synthetic construct
  misc_feature 1..20: note = chemically synthesized
  source 1..20: mol_type = other DNA
gccttgctgtggtggcccac

SEQ ID NO: 50332 - DNA, 20 bp, synthetic construct
  misc_feature 1..20: note = chemically synthesized
  source 1..20: mol_type = other DNA
ccttgctgtggtggcccaca

SEQ ID NO: 50333 - DNA, 20 bp, synthetic construct
  misc_feature 1..20: note = chemically synthesized
  source 1..20: mol_type = other DNA
ttgctgtggtggcccacaag

SEQ ID NO: 50334 - DNA, 20 bp, synthetic construct
  misc_feature 1..20: note = chemically synthesized
  source 1..20: mol_type = other DNA
ctgtggtggcccacaaggag

SEQ ID NO: 50335 - DNA, 20 bp, synthetic construct
  misc_feature 1..20: note = chemically synthesized
  source 1..20: mol_type = other DNA
gtggtggcccacaaggagtg

SEQ ID NO: 50336 - DNA, 20 bp, synthetic construct
  misc_feature 1..20: note = chemically synthesized
  source 1..20: mol_type = other DNA
cccacaaggagtggagatga

SEQ ID NO: 50337 - DNA, 20 bp, synthetic construct
  misc_feature 1..20: note = chemically synthesized
  source 1..20: mol_type = other DNA
cacaaggagtggagatgaca

SEQ ID NO: 50338 - DNA, 20 bp, synthetic construct
  misc_feature 1..20: note = chemically synthesized
  source 1..20: mol_type = other DNA
acaaggagtggagatgacag

SEQ ID NO: 50339 - DNA, 20 bp, synthetic construct
  misc_feature 1..20: note = chemically synthesized
  source 1..20: mol_type = other DNA
caaggagtggagatgacaga

SEQ ID NO: 50340 - DNA, 20 bp, synthetic construct
  misc_feature 1..20: note = chemically synthesized
  source 1..20: mol_type = other DNA
gtggagatgacagagggcct

SEQ ID NO: 50341 - DNA, 20 bp, synthetic construct
  misc_feature 1..20: note = chemically synthesized
  source 1..20: mol_type = other DNA
tggagatgacagagggcctt

SEQ ID NO: 50342 - DNA, 20 bp, synthetic construct
  misc_feature 1..20: note = chemically synthesized
  source 1..20: mol_type = other DNA
ggagatgacagagggccttg

SEQ ID NO: 50343 - DNA, 20 bp, synthetic construct
  misc_feature 1..20: note = chemically synthesized
  source 1..20: mol_type = other DNA
atgacagagggccttgggga

SEQ ID NO: 50344 - DNA, 20 bp, synthetic construct
  misc_feature 1..20: note = chemically synthesized
  source 1..20: mol_type = other DNA
tgacagagggccttggggac

SEQ ID NO: 50345 - DNA, 20 bp, synthetic construct
  misc_feature 1..20: note = chemically synthesized
  source 1..20: mol_type = other DNA
gacagagggccttggggaca

SEQ ID NO: 50346 - DNA, 20 bp, synthetic construct
  misc_feature 1..20: note = chemically synthesized
  source 1..20: mol_type = other DNA
gggccttggggacagggcaa

SEQ ID NO: 50347 - DNA, 20 bp, synthetic construct
  misc_feature 1..20: note = chemically synthesized
  source 1..20: mol_type = other DNA
cagggcaaaagctcatgtga

SEQ ID NO: 50348 - DNA, 20 bp, synthetic construct
  misc_feature 1..20: note = chemically synthesized
  source 1..20: mol_type = other DNA
agggcaaaagctcatgtgat

SEQ ID NO: 50349 - DNA, 20 bp, synthetic construct
  misc_feature 1..20: note = chemically synthesized
  source 1..20: mol_type = other DNA
gggcaaaagctcatgtgata

SEQ ID NO: 50350 - DNA, 20 bp, synthetic construct
  misc_feature 1..20: note = chemically synthesized
  source 1..20: mol_type = other DNA
atgctgtctctgcaaccaca

SEQ ID NO: 50351 - DNA, 20 bp, synthetic construct
  misc_feature 1..20: note = chemically synthesized
  source 1..20: mol_type = other DNA
tgcaaccacatggattttaa

SEQ ID NO: 50352 - DNA, 20 bp, synthetic construct
  misc_feature 1..20: note = chemically synthesized
  source 1..20: mol_type = other DNA
tggattttaatagttaccca

SEQ ID NO: 50353 - DNA, 20 bp, synthetic construct
  misc_feature 1..20: note = chemically synthesized
  source 1..20: mol_type = other DNA
ttttaatagttacccatggc

SEQ ID NO: 50354 - DNA, 20 bp, synthetic construct
  misc_feature 1..20: note = chemically synthesized
  source 1..20: mol_type = other DNA
tagttacccatggctggctt

SEQ ID NO: 50355 - DNA, 20 bp, synthetic construct
  misc_feature 1..20: note = chemically synthesized
  source 1..20: mol_type = other DNA
gcttcagctttttttgtgaa

SEQ ID NO: 50356 - DNA, 20 bp, synthetic construct
  misc_feature 1..20: note = chemically synthesized
  source 1..20: mol_type = other DNA
tcagctttttttgtgaatgg

SEQ ID NO: 50357 - DNA, 20 bp, synthetic construct
  misc_feature 1..20: note = chemically synthesized
  source 1..20: mol_type = other DNA
ttttgtgaatggcagccaaa

SEQ ID NO: 50358 - DNA, 20 bp, synthetic construct
  misc_feature 1..20: note = chemically synthesized
  source 1..20: mol_type = other DNA
tgaatggcagccaaaaagtg

SEQ ID NO: 50359 - DNA, 20 bp, synthetic construct
  misc_feature 1..20: note = chemically synthesized
  source 1..20: mol_type = other DNA
gccaaaaagtgtggtgaaaa

SEQ ID NO: 50360 - DNA, 20 bp, synthetic construct
  misc_feature 1..20: note = chemically synthesized
  source 1..20: mol_type = other DNA
caaaaagtgtggtgaaaatg

SEQ ID NO: 50361 - DNA, 20 bp, synthetic construct
  misc_feature 1..20: note = chemically synthesized
  source 1..20: mol_type = other DNA
aaaaagtgtggtgaaaatgg

SEQ ID NO: 50362 - DNA, 20 bp, synthetic construct
  misc_feature 1..20: note = chemically synthesized
  source 1..20: mol_type = other DNA
aaaagtgtggtgaaaatgga

SEQ ID NO: 50363 - DNA, 20 bp, synthetic construct
  misc_feature 1..20: note = chemically synthesized
  source 1..20: mol_type = other DNA
gtgtggtgaaaatggaggga

SEQ ID NO: 50364 - DNA, 20 bp, synthetic construct
  misc_feature 1..20: note = chemically synthesized
  source 1..20: mol_type = other DNA
gtgaaaatggagggatagtt

SEQ ID NO: 50365 - DNA, 20 bp, synthetic construct
  misc_feature 1..20: note = chemically synthesized
  source 1..20: mol_type = other DNA
aaaatggagggatagttcag

SEQ ID NO: 50366 - DNA, 20 bp, synthetic construct
  misc_feature 1..20: note = chemically synthesized
  source 1..20: mol_type = other DNA
aatggagggatagttcagtg

SEQ ID NO: 50367 - DNA, 20 bp, synthetic construct
  misc_feature 1..20: note = chemically synthesized
  source 1..20: mol_type = other DNA
gagggatagttcagtggaga

SEQ ID NO: 50368 - DNA, 20 bp, synthetic construct
  misc_feature 1..20: note = chemically synthesized
  source 1..20: mol_type = other DNA
gggatagttcagtggagaca

SEQ ID NO: 50369 - DNA, 20 bp, synthetic construct
  misc_feature 1..20: note = chemically synthesized
  source 1..20: mol_type = other DNA
ggatagttcagtggagacag

SEQ ID NO: 50370 - DNA, 20 bp, synthetic construct
  misc_feature 1..20: note = chemically synthesized
  source 1..20: mol_type = other DNA
gatagttcagtggagacaga

SEQ ID NO: 50371 - DNA, 20 bp, synthetic construct
  misc_feature 1..20: note = chemically synthesized
  source 1..20: mol_type = other DNA
atagttcagtggagacagag

SEQ ID NO: 50372 - DNA, 20 bp, synthetic construct
  misc_feature 1..20: note = chemically synthesized
  source 1..20: mol_type = other DNA
agttcagtggagacagaggg

SEQ ID NO: 50373 - DNA, 20 bp, synthetic construct
  misc_feature 1..20: note = chemically synthesized
  source 1..20: mol_type = other DNA
aggggagactgttgaatttg

SEQ ID NO: 50374 - DNA, 20 bp, synthetic construct
  misc_feature 1..20: note = chemically synthesized
  source 1..20: mol_type = other DNA
gggagactgttgaatttgtg

SEQ ID NO: 50375 - DNA, 20 bp, synthetic construct
  misc_feature 1..20: note = chemically synthesized
  source 1..20: mol_type = other DNA
tgttgaatttgtggagtttt

SEQ ID NO: 50376 - DNA, 20 bp, synthetic construct
  misc_feature 1..20: note = chemically synthesized
  source 1..20: mol_type = other DNA
agtttttagttcttcctaaa

SEQ ID NO: 50377 - DNA, 20 bp, synthetic construct
  misc_feature 1..20: note = chemically synthesized
  source 1..20: mol_type = other DNA
tttttagttcttcctaaaca

SEQ ID NO: 50378 - DNA, 20 bp, synthetic construct
  misc_feature 1..20: note = chemically synthesized
  source 1..20: mol_type = other DNA
tttagttcttcctaaacaga

SEQ ID NO: 50379 - DNA, 20 bp, synthetic construct
  misc_feature 1..20: note = chemically synthesized
  source 1..20: mol_type = other DNA
tcttcctaaacagagagcaa

SEQ ID NO: 50380 - DNA, 20 bp, synthetic construct
  misc_feature 1..20: note = chemically synthesized
  source 1..20: mol_type = other DNA
ctaaacagagagcaacagac

SEQ ID NO: 50381 - DNA, 20 bp, synthetic construct
  misc_feature 1..20: note = chemically synthesized
  source 1..20: mol_type = other DNA
aaacagagagcaacagacaa

SEQ ID NO: 50382 - DNA, 20 bp, synthetic construct
  misc_feature 1..20: note = chemically synthesized
  source 1..20: mol_type = other DNA
agagcaacagacaagagtta

SEQ ID NO: 50383 - DNA, 20 bp, synthetic construct
  misc_feature 1..20: note = chemically synthesized
  source 1..20: mol_type = other DNA
gttaatttaccctcaactac

SEQ ID NO: 50384 - DNA, 20 bp, synthetic construct
  misc_feature 1..20: note = chemically synthesized
  source 1..20: mol_type = other DNA
tttaccctcaactactggcc

SEQ ID NO: 50385 - DNA, 20 bp, synthetic construct
  misc_feature 1..20: note = chemically synthesized
  source 1..20: mol_type = other DNA
accctcaactactggccaag

SEQ ID NO: 50386 - DNA, 20 bp, synthetic construct
  misc_feature 1..20: note = chemically synthesized
  source 1..20: mol_type = other DNA
ccctcaactactggccaaga

SEQ ID NO: 50387 - DNA, 20 bp, synthetic construct
  misc_feature 1..20: note = chemically synthesized
  source 1..20: mol_type = other DNA
cctcaactactggccaagaa

SEQ ID NO: 50388 - DNA, 20 bp, synthetic construct
  misc_feature 1..20: note = chemically synthesized
  source 1..20: mol_type = other DNA
ctcaactactggccaagaag

SEQ ID NO: 50389 - DNA, 20 bp, synthetic construct
  misc_feature 1..20: note = chemically synthesized
  source 1..20: mol_type = other DNA
ggccaagaaggggtgtaact

SEQ ID NO: 50390 - DNA, 20 bp, synthetic construct
  misc_feature 1..20: note = chemically synthesized
  source 1..20: mol_type = other DNA
gttttcttcttttgtgccct

SEQ ID NO: 50391 - DNA, 20 bp, synthetic construct
  misc_feature 1..20: note = chemically synthesized
  source 1..20: mol_type = other DNA
ttcttcttttgtgccctgag

SEQ ID NO: 50392 - DNA, 20 bp, synthetic construct
  misc_feature 1..20: note = chemically synthesized
  source 1..20: mol_type = other DNA
ttcttttgtgccctgagtag

SEQ ID NO: 50393 - DNA, 20 bp, synthetic construct
  misc_feature 1..20: note = chemically synthesized
  source 1..20: mol_type = other DNA
tgtgccctgagtagcagacc

SEQ ID NO: 50394 - DNA, 20 bp, synthetic construct
  misc_feature 1..20: note = chemically synthesized
  source 1..20: mol_type = other DNA
tgccctgagtagcagaccca

SEQ ID NO: 50395 - DNA, 20 bp, synthetic construct
  misc_feature 1..20: note = chemically synthesized
  source 1..20: mol_type = other DNA
tgagtagcagacccagagtc

SEQ ID NO: 50396 - DNA, 20 bp, synthetic construct
  misc_feature 1..20: note = chemically synthesized
  source 1..20: mol_type = other DNA
agtagcagacccagagtctg

SEQ ID NO: 50397 - DNA, 20 bp, synthetic construct
  misc_feature 1..20: note = chemically synthesized
  source 1..20: mol_type = other DNA
agacccagagtctggagacc

SEQ ID NO: 50398 - DNA, 20 bp, synthetic construct
  misc_feature 1..20: note = chemically synthesized
  source 1..20: mol_type = other DNA
gagtctggagacccagattc

SEQ ID NO: 50399 - DNA, 20 bp, synthetic construct
  misc_feature 1..20: note = chemically synthesized
  source 1..20: mol_type = other DNA
agtctggagacccagattct

SEQ ID NO: 50400 - DNA, 20 bp, synthetic construct
  misc_feature 1..20: note = chemically synthesized
  source 1..20: mol_type = other DNA
ggagacccagattctaggcc

SEQ ID NO: 50401 - DNA, 20 bp, synthetic construct
  misc_feature 1..20: note = chemically synthesized
  source 1..20: mol_type = other DNA
cccagattctaggcctggct

SEQ ID NO: 50402 - DNA, 20 bp, synthetic construct
  misc_feature 1..20: note = chemically synthesized
  source 1..20: mol_type = other DNA
ggcctggcttggccaacgac

SEQ ID NO: 50403 - DNA, 20 bp, synthetic construct
  misc_feature 1..20: note = chemically synthesized
  source 1..20: mol_type = other DNA
ctggcttggccaacgacaag

SEQ ID NO: 50404 - DNA, 20 bp, synthetic construct
  misc_feature 1..20: note = chemically synthesized
  source 1..20: mol_type = other DNA
tggcttggccaacgacaagc

SEQ ID NO: 50405 - DNA, 20 bp, synthetic construct
  misc_feature 1..20: note = chemically synthesized
  source 1..20: mol_type = other DNA
ggcttggccaacgacaagca

SEQ ID NO: 50406 - DNA, 20 bp, synthetic construct
  misc_feature 1..20: note = chemically synthesized
  source 1..20: mol_type = other DNA
aacgacaagcagggtgacct

SEQ ID NO: 50407 - DNA, 20 bp, synthetic construct
  misc_feature 1..20: note = chemically synthesized
  source 1..20: mol_type = other DNA
acgacaagcagggtgacctt

SEQ ID NO: 50408 - DNA, 20 bp, synthetic construct
  misc_feature 1..20: note = chemically synthesized
  source 1..20: mol_type = other DNA
ccttgggttaaaaaaaaaaa

SEQ ID NO: 50409 - DNA, 20 bp, synthetic construct
  misc_feature 1..20: note = chemically synthesized
  source 1..20: mol_type = other DNA
cttgggttaaaaaaaaaaaa

SEQ ID NO: 50410 - DNA, 20 bp, synthetic construct
  misc_feature 1..20: note = chemically synthesized
  source 1..20: mol_type = other DNA
aaaaaaaggcatcattctct

SEQ ID NO: 50411 - DNA, 20 bp, synthetic construct
  misc_feature 1..20: note = chemically synthesized
  source 1..20: mol_type = other DNA
tctcactccctcttctcaaa

SEQ ID NO: 50412 - DNA, 20 bp, synthetic construct
  misc_feature 1..20: note = chemically synthesized
  source 1..20: mol_type = other DNA
actccctcttctcaaaaaga

SEQ ID NO: 50413 - DNA, 20 bp, synthetic construct
  misc_feature 1..20: note = chemically synthesized
  source 1..20: mol_type = other DNA
gatggcaattcctcccccgc

SEQ ID NO: 50414 - DNA, 20 bp, synthetic construct
  misc_feature 1..20: note = chemically synthesized
  source 1..20: mol_type = other DNA
cctcccccgctggttttcca

SEQ ID NO: 50415 - DNA, 20 bp, synthetic construct
  misc_feature 1..20: note = chemically synthesized
  source 1..20: mol_type = other DNA
cccgctggttttccatagtt

SEQ ID NO: 50416 - DNA, 20 bp, synthetic construct
  misc_feature 1..20: note = chemically synthesized
  source 1..20: mol_type = other DNA
ccgctggttttccatagttg

SEQ ID NO: 50417 - DNA, 20 bp, synthetic construct
  misc_feature 1..20: note = chemically synthesized
  source 1..20: mol_type = other DNA
ctggttttccatagttgagg

SEQ ID NO: 50418 - DNA, 20 bp, synthetic construct
  misc_feature 1..20: note = chemically synthesized
  source 1..20: mol_type = other DNA
ttttccatagttgaggtagc

SEQ ID NO: 50419 - DNA, 20 bp, synthetic construct
  misc_feature 1..20: note = chemically synthesized
  source 1..20: mol_type = other DNA
gaggtagcaagccaatgtgt

SEQ ID NO: 50420 - DNA, 20 bp, synthetic construct
  misc_feature 1..20: note = chemically synthesized
  source 1..20: mol_type = other DNA
aggtagcaagccaatgtgtt

SEQ ID NO: 50421 - DNA, 20 bp, synthetic construct
  misc_feature 1..20: note = chemically synthesized
  source 1..20: mol_type = other DNA
ggtagcaagccaatgtgttg

SEQ ID NO: 50422 - DNA, 20 bp, synthetic construct
  misc_feature 1..20: note = chemically synthesized
  source 1..20: mol_type = other DNA
agcaagccaatgtgttgggg

SEQ ID NO: 50423 - DNA, 20 bp, synthetic construct
  misc_feature 1..20: note = chemically synthesized
  source 1..20: mol_type = other DNA
gaaaacgccctgtgcatact

SEQ ID NO: 50424 - DNA, 20 bp, synthetic construct
  misc_feature 1..20: note = chemically synthesized
  source 1..20: mol_type = other DNA
aaaacgccctgtgcatactg

SEQ ID NO: 50425 - DNA, 20 bp, synthetic construct
  misc_feature 1..20: note = chemically synthesized
  source 1..20: mol_type = other DNA
atactgaggcttatgttcca

SEQ ID NO: 50426 - DNA, 20 bp, synthetic construct
  misc_feature 1..20: note = chemically synthesized
  source 1..20: mol_type = other DNA
tactgaggcttatgttccat

SEQ ID NO: 50427 - DNA, 20 bp, synthetic construct
  misc_feature 1..20: note = chemically synthesized
  source 1..20: mol_type = other DNA
actgaggcttatgttccatg

SEQ ID NO: 50428 - DNA, 20 bp, synthetic construct
  misc_feature 1..20: note = chemically synthesized
  source 1..20: mol_type = other DNA
ctgaggcttatgttccatgg

SEQ ID NO: 50429 - DNA, 20 bp, synthetic construct
  misc_feature 1..20: note = chemically synthesized
  source 1..20: mol_type = other DNA
tgaggcttatgttccatggg

SEQ ID NO: 50430 - DNA, 20 bp, synthetic construct
  misc_feature 1..20: note = chemically synthesized
  source 1..20: mol_type = other DNA
gcttatgttccatggggggc

SEQ ID NO: 50431 - DNA, 20 bp, synthetic construct
  misc_feature 1..20: note = chemically synthesized
  source 1..20: mol_type = other DNA
cttatgttccatggggggcc

SEQ ID NO: 50432 - DNA, 20 bp, synthetic construct
  misc_feature 1..20: note = chemically synthesized
  source 1..20: mol_type = other DNA
ttatgttccatggggggcca

SEQ ID NO: 50433 - DNA, 20 bp, synthetic construct
  misc_feature 1..20: note = chemically synthesized
  source 1..20: mol_type = other DNA
tatgttccatggggggccag

SEQ ID NO: 50434 - DNA, 20 bp, synthetic construct
  misc_feature 1..20: note = chemically synthesized
  source 1..20: mol_type = other DNA
ttccatggggggccaggggc

SEQ ID NO: 50435 - DNA, 20 bp, synthetic construct
  misc_feature 1..20: note = chemically synthesized
  source 1..20: mol_type = other DNA
tccatggggggccaggggcc

SEQ ID NO: 50436 - DNA, 20 bp, synthetic construct
  misc_feature 1..20: note = chemically synthesized
  source 1..20: mol_type = other DNA
tggggggccaggggccagga

SEQ ID NO: 50437 - DNA, 20 bp, synthetic construct
  misc_feature 1..20: note = chemically synthesized
  source 1..20: mol_type = other DNA
gccaggggccaggacagtga

SEQ ID NO: 50438 - DNA, 20 bp, synthetic construct
  misc_feature 1..20: note = chemically synthesized
  source 1..20: mol_type = other DNA
ccaggggccaggacagtgat

SEQ ID NO: 50439 - DNA, 20 bp, synthetic construct
  misc_feature 1..20: note = chemically synthesized
  source 1..20: mol_type = other DNA
aggggccaggacagtgatgg

SEQ ID NO: 50440 - DNA, 20 bp, synthetic construct
  misc_feature 1..20: note = chemically synthesized
  source 1..20: mol_type = other DNA
ggggccaggacagtgatggg

SEQ ID NO: 50441 - DNA, 20 bp, synthetic construct
  misc_feature 1..20: note = chemically synthesized
  source 1..20: mol_type = other DNA
ggccaggacagtgatgggag

SEQ ID NO: 50442 - DNA, 20 bp, synthetic construct
  misc_feature 1..20: note = chemically synthesized
  source 1..20: mol_type = other DNA
ggacagtgatgggaggagac

SEQ ID NO: 50443 - DNA, 20 bp, synthetic construct
  misc_feature 1..20: note = chemically synthesized
  source 1..20: mol_type = other DNA
gacagtgatgggaggagaca

SEQ ID NO: 50444 - DNA, 20 bp, synthetic construct
  misc_feature 1..20: note = chemically synthesized
  source 1..20: mol_type = other DNA
agtgatgggaggagacaagg

SEQ ID NO: 50445 - DNA, 20 bp, synthetic construct
  misc_feature 1..20: note = chemically synthesized
  source 1..20: mol_type = other DNA
gggaggagacaaggcggata

SEQ ID NO: 50446 - DNA, 20 bp, synthetic construct
  misc_feature 1..20: note = chemically synthesized
  source 1..20: mol_type = other DNA
gaggagacaaggcggataca

SEQ ID NO: 50447 - DNA, 20 bp, synthetic construct
  misc_feature 1..20: note = chemically synthesized
  source 1..20: mol_type = other DNA
aggagacaaggcggatacag

SEQ ID NO: 50448 - DNA, 20 bp, synthetic construct
  misc_feature 1..20: note = chemically synthesized
  source 1..20: mol_type = other DNA
gagacaaggcggatacagag

SEQ ID NO: 50449 - DNA, 20 bp, synthetic construct
  misc_feature 1..20: note = chemically synthesized
  source 1..20: mol_type = other DNA
acaaggcggatacagaggag

SEQ ID NO: 50450 - DNA, 20 bp, synthetic construct
  misc_feature 1..20: note = chemically synthesized
  source 1..20: mol_type = other DNA
gaggagcagattgtcatctc

SEQ ID NO: 50451 - DNA, 20 bp, synthetic construct
  misc_feature 1..20: note = chemically synthesized
  source 1..20: mol_type = other DNA
agcagattgtcatctccagc

SEQ ID NO: 50452 - DNA, 20 bp, synthetic construct
  misc_feature 1..20: note = chemically synthesized
  source 1..20: mol_type = other DNA
gcagattgtcatctccagct

SEQ ID NO: 50453 - DNA, 20 bp, synthetic construct
  misc_feature 1..20: note = chemically synthesized
  source 1..20: mol_type = other DNA
agattgtcatctccagctgg

SEQ ID NO: 50454 - DNA, 20 bp, synthetic construct
  misc_feature 1..20: note = chemically synthesized
  source 1..20: mol_type = other DNA
gattgtcatctccagctggg

SEQ ID NO: 50455 - DNA, 20 bp, synthetic construct
  misc_feature 1..20: note = chemically synthesized
  source 1..20: mol_type = other DNA
catctccagctgggaggtga

SEQ ID NO: 50456 - DNA, 20 bp, synthetic construct
  misc_feature 1..20: note = chemically synthesized
  source 1..20: mol_type = other DNA
tggccatgcctgcacccctc

SEQ ID NO: 50457 - DNA, 20 bp, synthetic construct
  misc_feature 1..20: note = chemically synthesized
  source 1..20: mol_type = other DNA
catgcctgcacccctctggc

SEQ ID NO: 50458 - DNA, 20 bp, synthetic construct
  misc_feature 1..20: note = chemically synthesized
  source 1..20: mol_type = other DNA
gcctgcacccctctggccag

SEQ ID NO: 50459 - DNA, 20 bp, synthetic construct
  misc_feature 1..20: note = chemically synthesized
  source 1..20: mol_type = other DNA
ctgcacccctctggccagca

SEQ ID NO: 50460 - DNA, 20 bp, synthetic construct
  misc_feature 1..20: note = chemically synthesized
  source 1..20: mol_type = other DNA
tgcacccctctggccagcag

SEQ ID NO: 50461 - DNA, 20 bp, synthetic construct
  misc_feature 1..20: note = chemically synthesized
  source 1..20: mol_type = other DNA
gcacccctctggccagcaga

SEQ ID NO: 50462 - DNA, 20 bp, synthetic construct
  misc_feature 1..20: note = chemically synthesized
  source 1..20: mol_type = other DNA
cccctctggccagcagaggg

SEQ ID NO: 50463 - DNA, 20 bp, synthetic construct
  misc_feature 1..20: note = chemically synthesized
  source 1..20: mol_type = other DNA
tctggccagcagagggtggt

SEQ ID NO: 50464 - DNA, 20 bp, synthetic construct
  misc_feature 1..20: note = chemically synthesized
  source 1..20: mol_type = other DNA
ggccagcagagggtggtcag

SEQ ID NO: 50465 - DNA, 20 bp, synthetic construct
  misc_feature 1..20: note = chemically synthesized
  source 1..20: mol_type = other DNA
gccagcagagggtggtcagt

SEQ ID NO: 50466 - DNA, 20 bp, synthetic construct
  misc_feature 1..20: note = chemically synthesized
  source 1..20: mol_type = other DNA
gagggtggtcagtaggaaac

SEQ ID NO: 50467 - DNA, 20 bp, synthetic construct
  misc_feature 1..20: note = chemically synthesized
  source 1..20: mol_type = other DNA
agggtggtcagtaggaaact

SEQ ID NO: 50468 - DNA, 20 bp, synthetic construct
  misc_feature 1..20: note = chemically synthesized
  source 1..20: mol_type = other DNA
ggtggtcagtaggaaactgg

SEQ ID NO: 50469 - DNA, 20 bp, synthetic construct
  misc_feature 1..20: note = chemically synthesized
  source 1..20: mol_type = other DNA
gtggtcagtaggaaactggg

SEQ ID NO: 50470 - DNA, 20 bp, synthetic construct
  misc_feature 1..20: note = chemically synthesized
  source 1..20: mol_type = other DNA
gtaggaaactgggaggccat

SEQ ID NO: 50471 - DNA, 20 bp, synthetic construct
  misc_feature 1..20: note = chemically synthesized
  source 1..20: mol_type = other DNA
taggaaactgggaggccatt

SEQ ID NO: 50472 - DNA, 20 bp, synthetic construct
  misc_feature 1..20: note = chemically synthesized
  source 1..20: mol_type = other DNA
aggaaactgggaggccatta

SEQ ID NO: 50473 - DNA, 20 bp, synthetic construct
  misc_feature 1..20: note = chemically synthesized
  source 1..20: mol_type = other DNA
ccattagggcaaccttctat

SEQ ID NO: 50474 - DNA, 20 bp, synthetic construct
  misc_feature 1..20: note = chemically synthesized
  source 1..20: mol_type = other DNA
agggcaaccttctattggct

SEQ ID NO: 50475 - DNA, 20 bp, synthetic construct
  misc_feature 1..20: note = chemically synthesized
  source 1..20: mol_type = other DNA
accttctattggctcagact

SEQ ID NO: 50476 - DNA, 20 bp, synthetic construct
  misc_feature 1..20: note = chemically synthesized
  source 1..20: mol_type = other DNA
attggctcagactcagaatg

SEQ ID NO: 50477 - DNA, 20 bp, synthetic construct
  misc_feature 1..20: note = chemically synthesized
  source 1..20: mol_type = other DNA
ggctcagactcagaatgcag

SEQ ID NO: 50478 - DNA, 20 bp, synthetic construct
  misc_feature 1..20: note = chemically synthesized
  source 1..20: mol_type = other DNA
gcagtagaacttgtgccctg

SEQ ID NO: 50479 - DNA, 20 bp, synthetic construct
  misc_feature 1..20: note = chemically synthesized
  source 1..20: mol_type = other DNA
cttgtgccctgtagtgttca

SEQ ID NO: 50480 - DNA, 20 bp, synthetic construct
  misc_feature 1..20: note = chemically synthesized
  source 1..20: mol_type = other DNA
tgccctgtagtgttcatgga

SEQ ID NO: 50481 - DNA, 20 bp, synthetic construct
  misc_feature 1..20: note = chemically synthesized
  source 1..20: mol_type = other DNA
gccctgtagtgttcatggac

SEQ ID NO: 50482 - DNA, 20 bp, synthetic construct
  misc_feature 1..20: note = chemically synthesized
  source 1..20: mol_type = other DNA
cctgtagtgttcatggacag

SEQ ID NO: 50483 - DNA, 20 bp, synthetic construct
  misc_feature 1..20: note = chemically synthesized
  source 1..20: mol_type = other DNA
tagtgttcatggacaggagt

SEQ ID NO: 50484 - DNA, 20 bp, synthetic construct
  misc_feature 1..20: note = chemically synthesized
  source 1..20: mol_type = other DNA
gtgttcatggacaggagtga

SEQ ID NO: 50485 - DNA, 20 bp, synthetic construct
  misc_feature 1..20: note = chemically synthesized
  source 1..20: mol_type = other DNA
tgttcatggacaggagtgag

SEQ ID NO: 50486 - DNA, 20 bp, synthetic construct
  misc_feature 1..20: note = chemically synthesized
  source 1..20: mol_type = other DNA
ttcatggacaggagtgagag

SEQ ID NO: 50487 - DNA, 20 bp, synthetic construct
  misc_feature 1..20: note = chemically synthesized
  source 1..20: mol_type = other DNA
tcatggacaggagtgagagg

SEQ ID NO: 50488 - DNA, 20 bp, synthetic construct
  misc_feature 1..20: note = chemically synthesized
  source 1..20: mol_type = other DNA
ggacaggagtgagaggagga

SEQ ID NO: 50489 - DNA, 20 bp, synthetic construct
  misc_feature 1..20: note = chemically synthesized
  source 1..20: mol_type = other DNA
gacaggagtgagaggaggac

SEQ ID NO: 50490 - DNA, 20 bp, synthetic construct
  misc_feature 1..20: note = chemically synthesized
  source 1..20: mol_type = other DNA
agtgagaggaggacaggact

SEQ ID NO: 50491 - DNA, 20 bp, synthetic construct
  misc_feature 1..20: note = chemically synthesized
  source 1..20: mol_type = other DNA
gtgagaggaggacaggactg

SEQ ID NO: 50492 - DNA, 20 bp, synthetic construct
  misc_feature 1..20: note = chemically synthesized
  source 1..20: mol_type = other DNA
tgagaggaggacaggactga

SEQ ID NO: 50493 - DNA, 20 bp, synthetic construct
  misc_feature 1..20: note = chemically synthesized
  source 1..20: mol_type = other DNA
gagaggaggacaggactgag

SEQ ID NO: 50494 - DNA, 20 bp, synthetic construct
  misc_feature 1..20: note = chemically synthesized
  source 1..20: mol_type = other DNA
aggacaggactgaggggatg

SEQ ID NO: 50495 - DNA, 20 bp, synthetic construct
  misc_feature 1..20: note = chemically synthesized
  source 1..20: mol_type = other DNA
actgaggggatgtggctgtc

SEQ ID NO: 50496 - DNA, 20 bp, synthetic construct
  misc_feature 1..20: note = chemically synthesized
  source 1..20: mol_type = other DNA
ctgaggggatgtggctgtca

SEQ ID NO: 50497 - DNA, 20 bp, synthetic construct
  misc_feature 1..20: note = chemically synthesized
  source 1..20: mol_type = other DNA
tgtggctgtcaaggcctttc

SEQ ID NO: 50498 - DNA, 20 bp, synthetic construct
  misc_feature 1..20: note = chemically synthesized
  source 1..20: mol_type = other DNA
gtggctgtcaaggcctttct

SEQ ID NO: 50499 - DNA, 20 bp, synthetic construct
  misc_feature 1..20: note = chemically synthesized
  source 1..20: mol_type = other DNA
tggctgtcaaggcctttcta

SEQ ID NO: 50500 - DNA, 20 bp, synthetic construct
  misc_feature 1..20: note = chemically synthesized
  source 1..20: mol_type = other DNA
ggctgtcaaggcctttctag

SEQ ID NO: 50501 - DNA, 20 bp, synthetic construct
  misc_feature 1..20: note = chemically synthesized
  source 1..20: mol_type = other DNA
gggcgatgctgtctctccct

SEQ ID NO: 50502 - DNA, 20 bp, synthetic construct
  misc_feature 1..20: note = chemically synthesized
  source 1..20: mol_type = other DNA
atgctgtctctccctcagca

SEQ ID NO: 50503 - DNA, 20 bp, synthetic construct
  misc_feature 1..20: note = chemically synthesized
  source 1..20: mol_type = other DNA
tgctgtctctccctcagcat

SEQ ID NO: 50504 - DNA, 20 bp, synthetic construct
  misc_feature 1..20: note = chemically synthesized
  source 1..20: mol_type = other DNA
gctgtctctccctcagcata

SEQ ID NO: 50505 - DNA, 20 bp, synthetic construct
  misc_feature 1..20: note = chemically synthesized
  source 1..20: mol_type = other DNA
tgtctctccctcagcatagg

SEQ ID NO: 50506 - DNA, 20 bp, synthetic construct
  misc_feature 1..20: note = chemically synthesized
  source 1..20: mol_type = other DNA
ctctccctcagcatagggag

SEQ ID NO: 50507 - DNA, 20 bp, synthetic construct
  misc_feature 1..20: note = chemically synthesized
  source 1..20: mol_type = other DNA
tctccctcagcatagggagt

SEQ ID NO: 50508 - DNA, 20 bp, synthetic construct
  misc_feature 1..20: note = chemically synthesized
  source 1..20: mol_type = other DNA
ggagtgggcccttccacctc

SEQ ID NO: 50509 - DNA, 20 bp, synthetic construct
  misc_feature 1..20: note = chemically synthesized
  source 1..20: mol_type = other DNA
cacctctggcctctctcccc

SEQ ID NO: 50510 - DNA, 20 bp, synthetic construct
  misc_feature 1..20: note = chemically synthesized
  source 1..20: mol_type = other DNA
acctctggcctctctccccc

SEQ ID NO: 50511 - DNA, 20 bp, synthetic construct
  misc_feature 1..20: note = chemically synthesized
  source 1..20: mol_type = other DNA
cctctggcctctctccccca

SEQ ID NO: 50512 - DNA, 20 bp, synthetic construct
  misc_feature 1..20: note = chemically synthesized
  source 1..20: mol_type = other DNA
ctctcccccagggctgtgtc

SEQ ID NO: 50513 - DNA, 20 bp, synthetic construct
  misc_feature 1..20: note = chemically synthesized
  source 1..20: mol_type = other DNA
gctgtccctgataaaactgt

SEQ ID NO: 50514 - DNA, 20 bp, synthetic construct
  misc_feature 1..20: note = chemically synthesized
  source 1..20: mol_type = other DNA
tccctgataaaactgtgaga

SEQ ID NO: 50515 - DNA, 20 bp, synthetic construct
  misc_feature 1..20: note = chemically synthesized
  source 1..20: mol_type = other DNA
taaaactgtgagatggtgtg

SEQ ID NO: 50516 - DNA, 20 bp, synthetic construct
  misc_feature 1..20: note = chemically synthesized
  source 1..20: mol_type = other DNA
tgtgagatggtgtgcagtgt

SEQ ID NO: 50517 - DNA, 20 bp, synthetic construct
  misc_feature 1..20: note = chemically synthesized
  source 1..20: mol_type = other DNA
tgagatggtgtgcagtgtcg

SEQ ID NO: 50518 - DNA, 20 bp, synthetic construct
  misc_feature 1..20: note = chemically synthesized
  source 1..20: mol_type = other DNA
ggtgtgcagtgtcggagcat

SEQ ID NO: 50519 - DNA, 20 bp, synthetic construct
  misc_feature 1..20: note = chemically synthesized
  source 1..20: mol_type = other DNA
gtgtgcagtgtcggagcatg

SEQ ID NO: 50520 - DNA, 20 bp, synthetic construct
  misc_feature 1..20: note = chemically synthesized
  source 1..20: mol_type = other DNA
tgtcggagcatgaggccact

SEQ ID NO: 50521 - DNA, 20 bp, synthetic construct
  misc_feature 1..20: note = chemically synthesized
  source 1..20: mol_type = other DNA
agcatgaggccactaagtgc

SEQ ID NO: 50522 - DNA, 20 bp, synthetic construct
  misc_feature 1..20: note = chemically synthesized
  source 1..20: mol_type = other DNA
catgaggccactaagtgcca

SEQ ID NO: 50523 - DNA, 20 bp, synthetic construct
  misc_feature 1..20: note = chemically synthesized
  source 1..20: mol_type = other DNA
agtttccgcgaccatatgaa

SEQ ID NO: 50524 - DNA, 20 bp, synthetic construct
  misc_feature 1..20: note = chemically synthesized
  source 1..20: mol_type = other DNA
aaaagcgtcattccatccga

SEQ ID NO: 50525 - DNA, 20 bp, synthetic construct
  misc_feature 1..20: note = chemically synthesized
  source 1..20: mol_type = other DNA
gtcattccatccgatggtcc

SEQ ID NO: 50526 - DNA, 20 bp, synthetic construct
  misc_feature 1..20: note = chemically synthesized
  source 1..20: mol_type = other DNA
gtcccagtgttgcttgtgtg

SEQ ID NO: 50527 - DNA, 20 bp, synthetic construct
  misc_feature 1..20: note = chemically synthesized
  source 1..20: mol_type = other DNA
cagtgttgcttgtgtgaaga

SEQ ID NO: 50528 - DNA, 20 bp, synthetic construct
  misc_feature 1..20: note = chemically synthesized
  source 1..20: mol_type = other DNA
gcctcctaccttgattgcat

SEQ ID NO: 50529 - DNA, 20 bp, synthetic construct
  misc_feature 1..20: note = chemically synthesized
  source 1..20: mol_type = other DNA
cctcctaccttgattgcatc

SEQ ID NO: 50530 - DNA, 20 bp, synthetic construct
  misc_feature 1..20: note = chemically synthesized
  source 1..20: mol_type = other DNA
ctcctaccttgattgcatca

SEQ ID NO: 50531 - DNA, 20 bp, synthetic construct
  misc_feature 1..20: note = chemically synthesized
  source 1..20: mol_type = other DNA
gcaatggccctgatgcaatc

SEQ ID NO: 50532 - DNA, 20 bp, synthetic construct
  misc_feature 1..20: note = chemically synthesized
  source 1..20: mol_type = other DNA
caatggccctgatgcaatca

SEQ ID NO: 50533 - DNA, 20 bp, synthetic construct
  misc_feature 1..20: note = chemically synthesized
  source 1..20: mol_type = other DNA
tggccctgatgcaatcaagg

SEQ ID NO: 50534 - DNA, 20 bp, synthetic construct
  misc_feature 1..20: note = chemically synthesized
  source 1..20: mol_type = other DNA
ggccctgatgcaatcaaggt

SEQ ID NO: 50535 - DNA, 20 bp, synthetic construct
  misc_feature 1..20: note = chemically synthesized
  source 1..20: mol_type = other DNA
ccctgatgcaatcaaggtag

SEQ ID NO: 50536 - DNA, 20 bp, synthetic construct
  misc_feature 1..20: note = chemically synthesized
  source 1..20: mol_type = other DNA
cctgatgcaatcaaggtagg

SEQ ID NO: 50537 - DNA, 20 bp, synthetic construct
  misc_feature 1..20: note = chemically synthesized
  source 1..20: mol_type = other DNA
gtaggaggctttcttcacac

SEQ ID NO: 50538 - DNA, 20 bp, synthetic construct
  misc_feature 1..20: note = chemically synthesized
  source 1..20: mol_type = other DNA
tttcttcacacaagcaacac

SEQ ID NO: 50539 - DNA, 20 bp, synthetic construct
  misc_feature 1..20: note = chemically synthesized
  source 1..20: mol_type = other DNA
ttcttcacacaagcaacact

SEQ ID NO: 50540 - DNA, 20 bp, synthetic construct
  misc_feature 1..20: note = chemically synthesized
  source 1..20: mol_type = other DNA
acaagcaacactgggaccat

SEQ ID NO: 50541 - DNA, 20 bp, synthetic construct
  misc_feature 1..20: note = chemically synthesized
  source 1..20: mol_type = other DNA
gcaacactgggaccatcgga

SEQ ID NO: 50542 - DNA, 20 bp, synthetic construct
  misc_feature 1..20: note = chemically synthesized
  source 1..20: mol_type = other DNA
atggaatgacgcttttcata

SEQ ID NO: 50543 - DNA, 20 bp, synthetic construct
  misc_feature 1..20: note = chemically synthesized
  source 1..20: mol_type = other DNA
tgacgcttttcatatggtcg

SEQ ID NO: 50544 - DNA, 20 bp, synthetic construct
  misc_feature 1..20: note = chemically synthesized
  source 1..20: mol_type = other DNA
tcatatggtcgcggaaactc

SEQ ID NO: 50545 - DNA, 20 bp, synthetic construct
  misc_feature 1..20: note = chemically synthesized
  source 1..20: mol_type = other DNA
gtcgcggaaactctggcact

SEQ ID NO: 50546 - DNA, 20 bp, synthetic construct
  misc_feature 1..20: note = chemically synthesized
  source 1..20: mol_type = other DNA
gcggaaactctggcacttag

SEQ ID NO: 50547 - DNA, 20 bp, synthetic construct
  misc_feature 1..20: note = chemically synthesized
  source 1..20: mol_type = other DNA
cgacactgcacaccatctca

SEQ ID NO: 50548 - DNA, 20 bp, synthetic construct
  misc_feature 1..20: note = chemically synthesized
  source 1..20: mol_type = other DNA
acaccatctcacagttttat

SEQ ID NO: 50549 - DNA, 20 bp, synthetic construct
  misc_feature 1..20: note = chemically synthesized
  source 1..20: mol_type = other DNA
caccatctcacagttttatc

SEQ ID NO: 50550 - DNA, 20 bp, synthetic construct
  misc_feature 1..20: note = chemically synthesized
  source 1..20: mol_type = other DNA
accatctcacagttttatca

SEQ ID NO: 50551 - DNA, 20 bp, synthetic construct
  misc_feature 1..20: note = chemically synthesized
  source 1..20: mol_type = other DNA
tctcacagttttatcaggga

SEQ ID NO: 50552 - DNA, 20 bp, synthetic construct
  misc_feature 1..20: note = chemically synthesized
  source 1..20: mol_type = other DNA
acagttttatcagggacagc

SEQ ID NO: 50553 - DNA, 20 bp, synthetic construct
  misc_feature 1..20: note = chemically synthesized
  source 1..20: mol_type = other DNA
ttatcagggacagccagaca

SEQ ID NO: 50554 - DNA, 20 bp, synthetic construct
  misc_feature 1..20: note = chemically synthesized
  source 1..20: mol_type = other DNA
gggacagccagacacagccc

SEQ ID NO: 50555 - DNA, 20 bp, synthetic construct
  misc_feature 1..20: note = chemically synthesized
  source 1..20: mol_type = other DNA
ggacagccagacacagccct

SEQ ID NO: 50556 - DNA, 20 bp, synthetic construct
  misc_feature 1..20: note = chemically synthesized
  source 1..20: mol_type = other DNA
gacagccagacacagccctg

SEQ ID NO: 50557 - DNA, 20 bp, synthetic construct
  misc_feature 1..20: note = chemically synthesized
  source 1..20: mol_type = other DNA
acagccagacacagccctgg

SEQ ID NO: 50558 - DNA, 20 bp, synthetic construct
  misc_feature 1..20: note = chemically synthesized
  source 1..20: mol_type = other DNA
agccagacacagccctgggg

SEQ ID NO: 50559 - DNA, 20 bp, synthetic construct
  misc_feature 1..20: note = chemically synthesized
  source 1..20: mol_type = other DNA
ccagacacagccctggggga

SEQ ID NO: 50560 - DNA, 20 bp, synthetic construct
  misc_feature 1..20: note = chemically synthesized
  source 1..20: mol_type = other DNA
agacacagccctgggggaga

SEQ ID NO: 50561 - DNA, 20 bp, synthetic construct
  misc_feature 1..20: note = chemically synthesized
  source 1..20: mol_type = other DNA
gacacagccctgggggagag

SEQ ID NO: 50562 - DNA, 20 bp, synthetic construct
  misc_feature 1..20: note = chemically synthesized
  source 1..20: mol_type = other DNA
cagccctgggggagagaggc

SEQ ID NO: 50563 - DNA, 20 bp, synthetic construct
  misc_feature 1..20: note = chemically synthesized
  source 1..20: mol_type = other DNA
gccctgggggagagaggcca

SEQ ID NO: 50564 - DNA, 20 bp, synthetic construct
  misc_feature 1..20: note = chemically synthesized
  source 1..20: mol_type = other DNA
ccctgggggagagaggccag

SEQ ID NO: 50565 - DNA, 20 bp, synthetic construct
  misc_feature 1..20: note = chemically synthesized
  source 1..20: mol_type = other DNA
tgggggagagaggccagagg

SEQ ID NO: 50566 - DNA, 20 bp, synthetic construct
  misc_feature 1..20: note = chemically synthesized
  source 1..20: mol_type = other DNA
gggagagaggccagaggtgg

SEQ ID NO: 50567 - DNA, 20 bp, synthetic construct
  misc_feature 1..20: note = chemically synthesized
  source 1..20: mol_type = other DNA
ggagagaggccagaggtgga

SEQ ID NO: 50568 - DNA, 20 bp, synthetic construct
  misc_feature 1..20: note = chemically synthesized
  source 1..20: mol_type = other DNA
gagagaggccagaggtggaa

SEQ ID NO: 50569 - DNA, 20 bp, synthetic construct
  misc_feature 1..20: note = chemically synthesized
  source 1..20: mol_type = other DNA
aagggcccactccctatgct

SEQ ID NO: 50570 - DNA, 20 bp, synthetic construct
  misc_feature 1..20: note = chemically synthesized
  source 1..20: mol_type = other DNA
agggcccactccctatgctg

SEQ ID NO: 50571 - DNA, 20 bp, synthetic construct
  misc_feature 1..20: note = chemically synthesized
  source 1..20: mol_type = other DNA
gggcccactccctatgctga

SEQ ID NO: 50572 - DNA, 20 bp, synthetic construct
  misc_feature 1..20: note = chemically synthesized
  source 1..20: mol_type = other DNA
gcccactccctatgctgagg

SEQ ID NO: 50573 - DNA, 20 bp, synthetic construct
  misc_feature 1..20: note = chemically synthesized
  source 1..20: mol_type = other DNA
ccactccctatgctgaggga

SEQ ID NO: 50574 - DNA, 20 bp, synthetic construct
  misc_feature 1..20: note = chemically synthesized
  source 1..20: mol_type = other DNA
tccctatgctgagggagaga

SEQ ID NO: 50575 - DNA, 20 bp, synthetic construct
  misc_feature 1..20: note = chemically synthesized
  source 1..20: mol_type = other DNA
gggagagacagcatcgcccc

SEQ ID NO: 50576 - DNA, 20 bp, synthetic construct
  misc_feature 1..20: note = chemically synthesized
  source 1..20: mol_type = other DNA
gagacagcatcgcccctaga

SEQ ID NO: 50577 - DNA, 20 bp, synthetic construct
  misc_feature 1..20: note = chemically synthesized
  source 1..20: mol_type = other DNA
agacagcatcgcccctagaa

SEQ ID NO: 50578 - DNA, 20 bp, synthetic construct
  misc_feature 1..20: note = chemically synthesized
  source 1..20: mol_type = other DNA
cgcccctagaaaggccttga

SEQ ID NO: 50579 - DNA, 20 bp, synthetic construct
  misc_feature 1..20: note = chemically synthesized
  source 1..20: mol_type = other DNA
ccttgacagccacatcccct

SEQ ID NO: 50580 - DNA, 20 bp, synthetic construct
  misc_feature 1..20: note = chemically synthesized
  source 1..20: mol_type = other DNA
actcctgtccatgaacacta

SEQ ID NO: 50581 - DNA, 20 bp, synthetic construct
  misc_feature 1..20: note = chemically synthesized
  source 1..20: mol_type = other DNA
ctcctgtccatgaacactac

SEQ ID NO: 50582 - DNA, 20 bp, synthetic construct
  misc_feature 1..20: note = chemically synthesized
  source 1..20: mol_type = other DNA
tcctgtccatgaacactaca

SEQ ID NO: 50583 - DNA, 20 bp, synthetic construct
  misc_feature 1..20: note = chemically synthesized
  source 1..20: mol_type = other DNA
ccatgaacactacagggcac

SEQ ID NO: 50584 - DNA, 20 bp, synthetic construct
  misc_feature 1..20: note = chemically synthesized
  source 1..20: mol_type = other DNA
cacaagttctactgcattct

SEQ ID NO: 50585 - DNA, 20 bp, synthetic construct
  misc_feature 1..20: note = chemically synthesized
  source 1..20: mol_type = other DNA
ttctactgcattctgagtct

SEQ ID NO: 50586 - DNA, 20 bp, synthetic construct
  misc_feature 1..20: note = chemically synthesized
  source 1..20: mol_type = other DNA
gcattctgagtctgagccaa

SEQ ID NO: 50587 - DNA, 20 bp, synthetic construct
  misc_feature 1..20: note = chemically synthesized
  source 1..20: mol_type = other DNA
ttctgagtctgagccaatag

SEQ ID NO: 50588 - DNA, 20 bp, synthetic construct
  misc_feature 1..20: note = chemically synthesized
  source 1..20: mol_type = other DNA
tctgagtctgagccaataga

SEQ ID NO: 50589 - DNA, 20 bp, synthetic construct
  misc_feature 1..20: note = chemically synthesized
  source 1..20: mol_type = other DNA
ccaatagaaggttgccctaa

SEQ ID NO: 50590 - DNA, 20 bp, synthetic construct
  misc_feature 1..20: note = chemically synthesized
  source 1..20: mol_type = other DNA
aggttgccctaatggcctcc

SEQ ID NO: 50591 - DNA, 20 bp, synthetic construct
  misc_feature 1..20: note = chemically synthesized
  source 1..20: mol_type = other DNA
tcctactgaccaccctctgc

SEQ ID NO: 50592 - DNA, 20 bp, synthetic construct
  misc_feature 1..20: note = chemically synthesized
  source 1..20: mol_type = other DNA
actgaccaccctctgctggc

SEQ ID NO: 50593 - DNA, 20 bp, synthetic construct
  misc_feature 1..20: note = chemically synthesized
  source 1..20: mol_type = other DNA
tgaccaccctctgctggcca

SEQ ID NO: 50594 - DNA, 20 bp, synthetic construct
  misc_feature 1..20: note = chemically synthesized
  source 1..20: mol_type = other DNA
gaccaccctctgctggccag

SEQ ID NO: 50595 - DNA, 20 bp, synthetic construct
  misc_feature 1..20: note = chemically synthesized
  source 1..20: mol_type = other DNA
accaccctctgctggccaga

SEQ ID NO: 50596 - DNA, 20 bp, synthetic construct
  misc_feature 1..20: note = chemically synthesized
  source 1..20: mol_type = other DNA
ccaccctctgctggccagag

SEQ ID NO: 50597 - DNA, 20 bp, synthetic construct
  misc_feature 1..20: note = chemically synthesized
  source 1..20: mol_type = other DNA
ctctgctggccagaggggtg

SEQ ID NO: 50598 - DNA, 20 bp, synthetic construct
  misc_feature 1..20: note = chemically synthesized
  source 1..20: mol_type = other DNA
tctgctggccagaggggtgc

SEQ ID NO: 50599 - DNA, 20 bp, synthetic construct
  misc_feature 1..20: note = chemically synthesized
  source 1..20: mol_type = other DNA
tggccagaggggtgcaggca

SEQ ID NO: 50600 - DNA, 20 bp, synthetic construct
  misc_feature 1..20: note = chemically synthesized
  source 1..20: mol_type = other DNA
caggcatggccatcacctcc

SEQ ID NO: 50601 - DNA, 20 bp, synthetic construct
  misc_feature 1..20: note = chemically synthesized
  source 1..20: mol_type = other DNA
catggccatcacctcccagc

SEQ ID NO: 50602 - DNA, 20 bp, synthetic construct
  misc_feature 1..20: note = chemically synthesized
  source 1..20: mol_type = other DNA
tggccatcacctcccagctg

SEQ ID NO: 50603 - DNA, 20 bp, synthetic construct
  misc_feature 1..20: note = chemically synthesized
  source 1..20: mol_type = other DNA
gtctcctcccatcactgtcc

SEQ ID NO: 50604 - DNA, 20 bp, synthetic construct
  misc_feature 1..20: note = chemically synthesized
  source 1..20: mol_type = other DNA
cccatcactgtcctggcccc

SEQ ID NO: 50605 - DNA, 20 bp, synthetic construct
  misc_feature 1..20: note = chemically synthesized
  source 1..20: mol_type = other DNA
tcctggcccctggcccccca

SEQ ID NO: 50606 - DNA, 20 bp, synthetic construct
  misc_feature 1..20: note = chemically synthesized
  source 1..20: mol_type = other DNA
cctggccccccatggaacat

SEQ ID NO: 50607 - DNA, 20 bp, synthetic construct
  misc_feature 1..20: note = chemically synthesized
  source 1..20: mol_type = other DNA
cccccatggaacataagcct

SEQ ID NO: 50608 - DNA, 20 bp, synthetic construct
  misc_feature 1..20: note = chemically synthesized
  source 1..20: mol_type = other DNA
aacataagcctcagtatgca

SEQ ID NO: 50609 - DNA, 20 bp, synthetic construct
  misc_feature 1..20: note = chemically synthesized
  source 1..20: mol_type = other DNA
acataagcctcagtatgcac

SEQ ID NO: 50610 - DNA, 20 bp, synthetic construct
  misc_feature 1..20: note = chemically synthesized
  source 1..20: mol_type = other DNA
cataagcctcagtatgcaca

SEQ ID NO: 50611 - DNA, 20 bp, synthetic construct
  misc_feature 1..20: note = chemically synthesized
  source 1..20: mol_type = other DNA
cagtatgcacagggcgtttt

SEQ ID NO: 50612 - DNA, 20 bp, synthetic construct
  misc_feature 1..20: note = chemically synthesized
  source 1..20: mol_type = other DNA
tttcagctaccccaacacat

SEQ ID NO: 50613 - DNA, 20 bp, synthetic construct
  misc_feature 1..20: note = chemically synthesized
  source 1..20: mol_type = other DNA
ttggcttgctacctcaacta

SEQ ID NO: 50614 - DNA, 20 bp, synthetic construct
  misc_feature 1..20: note = chemically synthesized
  source 1..20: mol_type = other DNA
ctacctcaactatggaaaac

SEQ ID NO: 50615 - DNA, 20 bp, synthetic construct
  misc_feature 1..20: note = chemically synthesized
  source 1..20: mol_type = other DNA
cctcaactatggaaaaccag

SEQ ID NO: 50616 - DNA, 20 bp, synthetic construct
  misc_feature 1..20: note = chemically synthesized
  source 1..20: mol_type = other DNA
ctcaactatggaaaaccagc

SEQ ID NO: 50617 - DNA, 20 bp, synthetic construct
  misc_feature 1..20: note = chemically synthesized
  source 1..20: mol_type = other DNA
tcaactatggaaaaccagcg

SEQ ID NO: 50618 - DNA, 20 bp, synthetic construct
  misc_feature 1..20: note = chemically synthesized
  source 1..20: mol_type = other DNA
caactatggaaaaccagcgg

SEQ ID NO: 50619 - DNA, 20 bp, synthetic construct
  misc_feature 1..20: note = chemically synthesized
  source 1..20: mol_type = other DNA
actatggaaaaccagcgggg

SEQ ID NO: 50620 - DNA, 20 bp, synthetic construct
  misc_feature 1..20: note = chemically synthesized
  source 1..20: mol_type = other DNA
ctatggaaaaccagcggggg

SEQ ID NO: 50621 - DNA, 20 bp, synthetic construct
  misc_feature 1..20: note = chemically synthesized
  source 1..20: mol_type = other DNA
ggaggaattgccatcttttt

SEQ ID NO: 50622 - DNA, 20 bp, synthetic construct
  misc_feature 1..20: note = chemically synthesized
  source 1..20: mol_type = other DNA
ggaattgccatctttttgag

SEQ ID NO: 50623 - DNA, 20 bp, synthetic construct
  misc_feature 1..20: note = chemically synthesized
  source 1..20: mol_type = other DNA
aattgccatctttttgagaa

SEQ ID NO: 50624 - DNA, 20 bp, synthetic construct
  misc_feature 1..20: note = chemically synthesized
  source 1..20: mol_type = other DNA
attgccatctttttgagaag

SEQ ID NO: 50625 - DNA, 20 bp, synthetic construct
  misc_feature 1..20: note = chemically synthesized
  source 1..20: mol_type = other DNA
ttgccatctttttgagaaga

SEQ ID NO: 50626 - DNA, 20 bp, synthetic construct
  misc_feature 1..20: note = chemically synthesized
  source 1..20: mol_type = other DNA
gccatctttttgagaagagg

SEQ ID NO: 50627 - DNA, 20 bp, synthetic construct
  misc_feature 1..20: note = chemically synthesized
  source 1..20: mol_type = other DNA
tctttttgagaagagggagt

SEQ ID NO: 50628 - DNA, 20 bp, synthetic construct
  misc_feature 1..20: note = chemically synthesized
  source 1..20: mol_type = other DNA
tgagaagagggagtgagact

SEQ ID NO: 50629 - DNA, 20 bp, synthetic construct
  misc_feature 1..20: note = chemically synthesized
  source 1..20: mol_type = other DNA
agaagagggagtgagactca

SEQ ID NO: 50630 - DNA, 20 bp, synthetic construct
  misc_feature 1..20: note = chemically synthesized
  source 1..20: mol_type = other DNA
cctttttttttttttaaccc

SEQ ID NO: 50631 - DNA, 20 bp, synthetic construct
  misc_feature 1..20: note = chemically synthesized
  source 1..20: mol_type = other DNA
ctttttttttttttaaccca

SEQ ID NO: 50632 - DNA, 20 bp, synthetic construct
  misc_feature 1..20: note = chemically synthesized
  source 1..20: mol_type = other DNA
aaggtcaccctgcttgtcgt

SEQ ID NO: 50633 - DNA, 20 bp, synthetic construct
  misc_feature 1..20: note = chemically synthesized
  source 1..20: mol_type = other DNA
caccctgcttgtcgttggcc

SEQ ID NO: 50634 - DNA, 20 bp, synthetic construct
  misc_feature 1..20: note = chemically synthesized
  source 1..20: mol_type = other DNA
ctgcttgtcgttggccaagc

SEQ ID NO: 50635 - DNA, 20 bp, synthetic construct
  misc_feature 1..20: note = chemically synthesized
  source 1..20: mol_type = other DNA
tgcttgtcgttggccaagcc

SEQ ID NO: 50636 - DNA, 20 bp, synthetic construct
  misc_feature 1..20: note = chemically synthesized
  source 1..20: mol_type = other DNA
gtcgttggccaagccaggcc

SEQ ID NO: 50637 - DNA, 20 bp, synthetic construct
  misc_feature 1..20: note = chemically synthesized
  source 1..20: mol_type = other DNA
gccaagccaggcctagaatc

SEQ ID NO: 50638 - DNA, 20 bp, synthetic construct
  misc_feature 1..20: note = chemically synthesized
  source 1..20: mol_type = other DNA
ccaagccaggcctagaatct

SEQ ID NO: 50639 - DNA, 20 bp, synthetic construct
  misc_feature 1..20: note = chemically synthesized
  source 1..20: mol_type = other DNA
aggcctagaatctgggtctc

SEQ ID NO: 50640 - DNA, 20 bp, synthetic construct
  misc_feature 1..20: note = chemically synthesized
  source 1..20: mol_type = other DNA
gaatctgggtctccagactc

SEQ ID NO: 50641 - DNA, 20 bp, synthetic construct
  misc_feature 1..20: note = chemically synthesized
  source 1..20: mol_type = other DNA
aatctgggtctccagactct

SEQ ID NO: 50642 - DNA, 20 bp, synthetic construct
  misc_feature 1..20: note = chemically synthesized
  source 1..20: mol_type = other DNA
cagactctgggtctgctact

SEQ ID NO: 50643 - DNA, 20 bp, synthetic construct
  misc_feature 1..20: note = chemically synthesized
  source 1..20: mol_type = other DNA
agactctgggtctgctactc

SEQ ID NO: 50644 - DNA, 20 bp, synthetic construct
  misc_feature 1..20: note = chemically synthesized
  source 1..20: mol_type = other DNA
gactctgggtctgctactca

SEQ ID NO: 50645 - DNA, 20 bp, synthetic construct
  misc_feature 1..20: note = chemically synthesized
  source 1..20: mol_type = other DNA
gtctgctactcagggcacaa

SEQ ID NO: 50646 - DNA, 20 bp, synthetic construct
  misc_feature 1..20: note = chemically synthesized
  source 1..20: mol_type = other DNA
tgctactcagggcacaaaag

SEQ ID NO: 50647 - DNA, 20 bp, synthetic construct
  misc_feature 1..20: note = chemically synthesized
  source 1..20: mol_type = other DNA
acaaaagaagaaaacattct

SEQ ID NO: 50648 - DNA, 20 bp, synthetic construct
  misc_feature 1..20: note = chemically synthesized
  source 1..20: mol_type = other DNA
ttctgagttacaccccttct

SEQ ID NO: 50649 - DNA, 20 bp, synthetic construct
  misc_feature 1..20: note = chemically synthesized
  source 1..20: mol_type = other DNA
gagttacaccccttcttggc

SEQ ID NO: 50650 - DNA, 20 bp, synthetic construct
  misc_feature 1..20: note = chemically synthesized
  source 1..20: mol_type = other DNA
ttacaccccttcttggccag

SEQ ID NO: 50651 - DNA, 20 bp, synthetic construct
  misc_feature 1..20: note = chemically synthesized
  source 1..20: mol_type = other DNA
ccccttcttggccagtagtt

SEQ ID NO: 50652 - DNA, 20 bp, synthetic construct
  misc_feature 1..20: note = chemically synthesized
  source 1..20: mol_type = other DNA
cccttcttggccagtagttg

SEQ ID NO: 50653 - DNA, 20 bp, synthetic construct
  misc_feature 1..20: note = chemically synthesized
  source 1..20: mol_type = other DNA
ccttcttggccagtagttga

SEQ ID NO: 50654 - DNA, 20 bp, synthetic construct
  misc_feature 1..20: note = chemically synthesized
  source 1..20: mol_type = other DNA
gttgagggtaaattaacgaa

SEQ ID NO: 50655 - DNA, 20 bp, synthetic construct
  misc_feature 1..20: note = chemically synthesized
  source 1..20: mol_type = other DNA
cttgtctgttgctctctgtt

SEQ ID NO: 50656 - DNA, 20 bp, synthetic construct
  misc_feature 1..20: note = chemically synthesized
  source 1..20: mol_type = other DNA
ttgtctgttgctctctgttt

SEQ ID NO: 50657 - DNA, 20 bp, synthetic construct
  misc_feature 1..20: note = chemically synthesized
  source 1..20: mol_type = other DNA
tctgttgctctctgtttagg

SEQ ID NO: 50658 - DNA, 20 bp, synthetic construct
  misc_feature 1..20: note = chemically synthesized
  source 1..20: mol_type = other DNA
taaaaactccacaaattcaa

SEQ ID NO: 50659 - DNA, 20 bp, synthetic construct
  misc_feature 1..20: note = chemically synthesized
  source 1..20: mol_type = other DNA
tccattttcaccacactttt

SEQ ID NO: 50660 - DNA, 20 bp, synthetic construct
  misc_feature 1..20: note = chemically synthesized
  source 1..20: mol_type = other DNA
ttggctgccattcacaaaaa

SEQ ID NO: 50661 - DNA, 20 bp, synthetic construct
  misc_feature 1..20: note = chemically synthesized
  source 1..20: mol_type = other DNA
gccattcacaaaaaaagctg

SEQ ID NO: 50662 - DNA, 20 bp, synthetic construct
  misc_feature 1..20: note = chemically synthesized
  source 1..20: mol_type = other DNA
ttcacaaaaaaagctgaagc

SEQ ID NO: 50663 - DNA, 20 bp, synthetic construct
  misc_feature 1..20: note = chemically synthesized
  source 1..20: mol_type = other DNA
aaaaaagctgaagccagcca

SEQ ID NO: 50664 - DNA, 20 bp, synthetic construct
  misc_feature 1..20: note = chemically synthesized
  source 1..20: mol_type = other DNA
aaaaagctgaagccagccat

SEQ ID NO: 50665 - DNA, 20 bp, synthetic construct
  misc_feature 1..20: note = chemically synthesized
  source 1..20: mol_type = other DNA
ggtaactattaaaatccatg

SEQ ID NO: 50666 - DNA, 20 bp, synthetic construct
  misc_feature 1..20: note = chemically synthesized
  source 1..20: mol_type = other DNA
tattaaaatccatgtggttg

SEQ ID NO: 50667 - DNA, 20 bp, synthetic construct
  misc_feature 1..20: note = chemically synthesized
  source 1..20: mol_type = other DNA
ttaaaatccatgtggttgca

SEQ ID NO: 50668 - DNA, 20 bp, synthetic construct
  misc_feature 1..20: note = chemically synthesized
  source 1..20: mol_type = other DNA
aatccatgtggttgcagaga

SEQ ID NO: 50669 - DNA, 20 bp, synthetic construct
  misc_feature 1..20: note = chemically synthesized
  source 1..20: mol_type = other DNA
agacagcatccctatcacat

SEQ ID NO: 50670 - DNA, 20 bp, synthetic construct
  misc_feature 1..20: note = chemically synthesized
  source 1..20: mol_type = other DNA
tgagcttttgccctgtcccc

SEQ ID NO: 50671 - DNA, 20 bp, synthetic construct
  misc_feature 1..20: note = chemically synthesized
  source 1..20: mol_type = other DNA
gagcttttgccctgtcccca

SEQ ID NO: 50672 - DNA, 20 bp, synthetic construct
  misc_feature 1..20: note = chemically synthesized
  source 1..20: mol_type = other DNA
tctgtcatctccactccttg

SEQ ID NO: 50673 - DNA, 20 bp, synthetic construct
  misc_feature 1..20: note = chemically synthesized
  source 1..20: mol_type = other DNA
ctgtcatctccactccttgt

SEQ ID NO: 50674 - DNA, 20 bp, synthetic construct
  misc_feature 1..20: note = chemically synthesized
  source 1..20: mol_type = other DNA
ccactccttgtgggccacca

SEQ ID NO: 50675 - DNA, 20 bp, synthetic construct
  misc_feature 1..20: note = chemically synthesized
  source 1..20: mol_type = other DNA
tccttgtgggccaccacagc

SEQ ID NO: 50676 - DNA, 20 bp, synthetic construct
  misc_feature 1..20: note = chemically synthesized
  source 1..20: mol_type = other DNA
ccttgtgggccaccacagca

SEQ ID NO: 50677 - DNA, 20 bp, synthetic construct
  misc_feature 1..20: note = chemically synthesized
  source 1..20: mol_type = other DNA
ccacagcaaggctgactcac

SEQ ID NO: 50678 - DNA, 20 bp, synthetic construct
  misc_feature 1..20: note = chemically synthesized
  source 1..20: mol_type = other DNA
aggctgactcactggctctg

SEQ ID NO: 50679 - DNA, 20 bp, synthetic construct
  misc_feature 1..20: note = chemically synthesized
  source 1..20: mol_type = other DNA
ctgactcactggctctgaag

SEQ ID NO: 50680 - DNA, 20 bp, synthetic construct
  misc_feature 1..20: note = chemically synthesized
  source 1..20: mol_type = other DNA
ggctctgaagaagatccaca

SEQ ID NO: 50681 - DNA, 20 bp, synthetic construct
  misc_feature 1..20: note = chemically synthesized
  source 1..20: mol_type = other DNA
aagaagatccacaaagcctg

SEQ ID NO: 50682 - DNA, 20 bp, synthetic construct
  misc_feature 1..20: note = chemically synthesized
  source 1..20: mol_type = other DNA
gaagatccacaaagcctgtg

SEQ ID NO: 50683 - DNA, 20 bp, synthetic construct
  misc_feature 1..20: note = chemically synthesized
  source 1..20: mol_type = other DNA
agatccacaaagcctgtgga

SEQ ID NO: 50684 - DNA, 20 bp, synthetic construct
  misc_feature 1..20: note = chemically synthesized
  source 1..20: mol_type = other DNA
gatccacaaagcctgtggag

SEQ ID NO: 50685 - DNA, 20 bp, synthetic construct
  misc_feature 1..20: note = chemically synthesized
  source 1..20: mol_type = other DNA
tccacaaagcctgtggagag

SEQ ID NO: 50686 - DNA, 20 bp, synthetic construct
  misc_feature 1..20: note = chemically synthesized
  source 1..20: mol_type = other DNA
ccacaaagcctgtggagagg

SEQ ID NO: 50687 - DNA, 20 bp, synthetic construct
  misc_feature 1..20: note = chemically synthesized
  source 1..20: mol_type = other DNA
gcctgtggagaggaggccca

SEQ ID NO: 50688 - DNA, 20 bp, synthetic construct
  misc_feature 1..20: note = chemically synthesized
  source 1..20: mol_type = other DNA
agaggaggcccacagctctc

SEQ ID NO: 50689 - DNA, 20 bp, synthetic construct
  misc_feature 1..20: note = chemically synthesized
  source 1..20: mol_type = other DNA
gaggaggcccacagctctcc

SEQ ID NO: 50690 - DNA, 20 bp, synthetic construct
  misc_feature 1..20: note = chemically synthesized
  source 1..20: mol_type = other DNA
cacagctctccaggatgcat

SEQ ID NO: 50691 - DNA, 20 bp, synthetic construct
  misc_feature 1..20: note = chemically synthesized
  source 1..20: mol_type = other DNA
acagctctccaggatgcatg

SEQ ID NO: 50692 - DNA, 20 bp, synthetic construct
  misc_feature 1..20: note = chemically synthesized
  source 1..20: mol_type = other DNA
agctctccaggatgcatgag

SEQ ID NO: 50693 - DNA, 20 bp, synthetic construct
  misc_feature 1..20: note = chemically synthesized
  source 1..20: mol_type = other DNA
gctctccaggatgcatgagg

SEQ ID NO: 50694 - DNA, 20 bp, synthetic construct
  misc_feature 1..20: note = chemically synthesized
  source 1..20: mol_type = other DNA
ctctccaggatgcatgagga

SEQ ID NO: 50695 - DNA, 20 bp, synthetic construct
  misc_feature 1..20: note = chemically synthesized
  source 1..20: mol_type = other DNA
tctccaggatgcatgaggag

SEQ ID NO: 50696 - DNA, 20 bp, synthetic construct
  misc_feature 1..20: note = chemically synthesized
  source 1..20: mol_type = other DNA
gatgcatgaggaggggccac

SEQ ID NO: 50697 - DNA, 20 bp, synthetic construct
  misc_feature 1..20: note = chemically synthesized
  source 1..20: mol_type = other DNA
atgcatgaggaggggccacc

SEQ ID NO: 50698 - DNA, 20 bp, synthetic construct
  misc_feature 1..20: note = chemically synthesized
  source 1..20: mol_type = other DNA
tgcatgaggaggggccacca

SEQ ID NO: 50699 - DNA, 20 bp, synthetic construct
  misc_feature 1..20: note = chemically synthesized
  source 1..20: mol_type = other DNA
tgaggaggggccaccaggga

SEQ ID NO: 50700 - DNA, 20 bp, synthetic construct
  misc_feature 1..20: note = chemically synthesized
  source 1..20: mol_type = other DNA
gccaccagggatggccaccc

SEQ ID NO: 50701 - DNA, 20 bp, synthetic construct
  misc_feature 1..20: note = chemically synthesized
  source 1..20: mol_type = other DNA
gcgacccccattttccctct

SEQ ID NO: 50702 - DNA, 20 bp, synthetic construct
  misc_feature 1..20: note = chemically synthesized
  source 1..20: mol_type = other DNA
ccattttccctcttggccca

SEQ ID NO: 50703 - DNA, 20 bp, synthetic construct
  misc_feature 1..20: note = chemically synthesized
  source 1..20: mol_type = other DNA
cattttccctcttggcccat

SEQ ID NO: 50704 - DNA, 20 bp, synthetic construct
  misc_feature 1..20: note = chemically synthesized
  source 1..20: mol_type = other DNA
tcttggcccatgggaaatcc

SEQ ID NO: 50705 - DNA, 20 bp, synthetic construct
  misc_feature 1..20: note = chemically synthesized
  source 1..20: mol_type = other DNA
cttggcccatgggaaatcct

SEQ ID NO: 50706 - DNA, 20 bp, synthetic construct
  misc_feature 1..20: note = chemically synthesized
  source 1..20: mol_type = other DNA
tggcccatgggaaatcctag

SEQ ID NO: 50707 - DNA, 20 bp, synthetic construct
  misc_feature 1..20: note = chemically synthesized
  source 1..20: mol_type = other DNA
ggcccatgggaaatcctagg

SEQ ID NO: 50708 - DNA, 20 bp, synthetic construct
  misc_feature 1..20: note = chemically synthesized
  source 1..20: mol_type = other DNA
gaaatcctaggaggcaacat

SEQ ID NO: 50709 - DNA, 20 bp, synthetic construct
  misc_feature 1..20: note = chemically synthesized
  source 1..20: mol_type = other DNA
taggaggcaacataagcctg

SEQ ID NO: 50710 - DNA, 20 bp, synthetic construct
  misc_feature 1..20: note = chemically synthesized
  source 1..20: mol_type = other DNA
gaggcaacataagcctgtgg

SEQ ID NO: 50711 - DNA, 20 bp, synthetic construct
  misc_feature 1..20: note = chemically synthesized
  source 1..20: mol_type = other DNA
cctgtggcagcccctccaca

SEQ ID NO: 50712 - DNA, 20 bp, synthetic construct
  misc_feature 1..20: note = chemically synthesized
  source 1..20: mol_type = other DNA
cctccacaaagccctgcctc

SEQ ID NO: 50713 - DNA, 20 bp, synthetic construct
  misc_feature 1..20: note = chemically synthesized
  source 1..20: mol_type = other DNA
tccacaaagccctgcctcca

SEQ ID NO: 50714 - DNA, 20 bp, synthetic construct
  misc_feature 1..20: note = chemically synthesized
  source 1..20: mol_type = other DNA
ccctgcctccagagttccca

SEQ ID NO: 50715 - DNA, 20 bp, synthetic construct
  misc_feature 1..20: note = chemically synthesized
  source 1..20: mol_type = other DNA
cctgcctccagagttcccat

SEQ ID NO: 50716 - DNA, 20 bp, synthetic construct
  misc_feature 1..20: note = chemically synthesized
  source 1..20: mol_type = other DNA
cctccagagttcccataggc

SEQ ID NO: 50717 - DNA, 20 bp, synthetic construct
  misc_feature 1..20: note = chemically synthesized
  source 1..20: mol_type = other DNA
cataggcgagaatgtgtcct

SEQ ID NO: 50718 - DNA, 20 bp, synthetic construct
  misc_feature 1..20: note = chemically synthesized
  source 1..20: mol_type = other DNA
aggcgagaatgtgtcctcag

SEQ ID NO: 50719 - DNA, 20 bp, synthetic construct
  misc_feature 1..20: note = chemically synthesized
  source 1..20: mol_type = other DNA
gcgagaatgtgtcctcagtg

SEQ ID NO: 50720 - DNA, 20 bp, synthetic construct
  misc_feature 1..20: note = chemically synthesized
  source 1..20: mol_type = other DNA
cagtggagcattaccttgca

SEQ ID NO: 50721 - DNA, 20 bp, synthetic construct
  misc_feature 1..20: note = chemically synthesized
  source 1..20: mol_type = other DNA
attaccttgcacagcctgtg

SEQ ID NO: 50722 - DNA, 20 bp, synthetic construct
  misc_feature 1..20: note = chemically synthesized
  source 1..20: mol_type = other DNA
agcctgtgaagtgctctgtg

SEQ ID NO: 50723 - DNA, 20 bp, synthetic construct
  misc_feature 1..20: note = chemically synthesized
  source 1..20: mol_type = other DNA
gcctgtgaagtgctctgtgc

SEQ ID NO: 50724 - DNA, 20 bp, synthetic construct
  misc_feature 1..20: note = chemically synthesized
  source 1..20: mol_type = other DNA
cctgtgaagtgctctgtgcg

SEQ ID NO: 50725 - DNA, 20 bp, synthetic construct
  misc_feature 1..20: note = chemically synthesized
  source 1..20: mol_type = other DNA
aagtgctctgtgcggggata

SEQ ID NO: 50726 - DNA, 20 bp, synthetic construct
  misc_feature 1..20: note = chemically synthesized
  source 1..20: mol_type = other DNA
agtgctctgtgcggggataa

SEQ ID NO: 50727 - DNA, 20 bp, synthetic construct
  misc_feature 1..20: note = chemically synthesized
  source 1..20: mol_type = other DNA
ctctgtgcggggataaaggc

SEQ ID NO: 50728 - DNA, 20 bp, synthetic construct
  misc_feature 1..20: note = chemically synthesized
  source 1..20: mol_type = other DNA
ggggataaaggcaagtaacg

SEQ ID NO: 50729 - DNA, 20 bp, synthetic construct
  misc_feature 1..20: note = chemically synthesized
  source 1..20: mol_type = other DNA
gggataaaggcaagtaacgt

SEQ ID NO: 50730 - DNA, 20 bp, synthetic construct
  misc_feature 1..20: note = chemically synthesized
  source 1..20: mol_type = other DNA
ggataaaggcaagtaacgtg

SEQ ID NO: 50731 - DNA, 20 bp, synthetic construct
  misc_feature 1..20: note = chemically synthesized
  source 1..20: mol_type = other DNA
gtaacgtggggtcctctctc

SEQ ID NO: 50732 - DNA, 20 bp, synthetic construct
  misc_feature 1..20: note = chemically synthesized
  source 1..20: mol_type = other DNA
taacgtggggtcctctctca

SEQ ID NO: 50733 - DNA, 20 bp, synthetic construct
  misc_feature 1..20: note = chemically synthesized
  source 1..20: mol_type = other DNA
gtcctctctcaaggaattgc

SEQ ID NO: 50734 - DNA, 20 bp, synthetic construct
  misc_feature 1..20: note = chemically synthesized
  source 1..20: mol_type = other DNA
ctcaaggaattgctagctta

SEQ ID NO: 50735 - DNA, 20 bp, synthetic construct
  misc_feature 1..20: note = chemically synthesized
  source 1..20: mol_type = other DNA
tcaaggaattgctagcttat

SEQ ID NO: 50736 - DNA, 20 bp, synthetic construct
  misc_feature 1..20: note = chemically synthesized
  source 1..20: mol_type = other DNA
caaggaattgctagcttatg

SEQ ID NO: 50737 - DNA, 20 bp, synthetic construct
  misc_feature 1..20: note = chemically synthesized
  source 1..20: mol_type = other DNA
aggaattgctagcttatggg

SEQ ID NO: 50738 - DNA, 20 bp, synthetic construct
  misc_feature 1..20: note = chemically synthesized
  source 1..20: mol_type = other DNA
gaattgctagcttatgggga

SEQ ID NO: 50739 - DNA, 20 bp, synthetic construct
  misc_feature 1..20: note = chemically synthesized
  source 1..20: mol_type = other DNA
tggggagagaaaactaaacg

SEQ ID NO: 50740 - DNA, 20 bp, synthetic construct
  misc_feature 1..20: note = chemically synthesized
  source 1..20: mol_type = other DNA
ggagagaaaactaaacgtgg

SEQ ID NO: 50741 - DNA, 20 bp, synthetic construct
  misc_feature 1..20: note = chemically synthesized
  source 1..20: mol_type = other DNA
actaaacgtggaagccccaa

SEQ ID NO: 50742 - DNA, 20 bp, synthetic construct
  misc_feature 1..20: note = chemically synthesized
  source 1..20: mol_type = other DNA
tgtgacaaatgccccatgaa

SEQ ID NO: 50743 - DNA, 20 bp, synthetic construct
  misc_feature 1..20: note = chemically synthesized
  source 1..20: mol_type = other DNA
gacaaatgccccatgaatgg

SEQ ID NO: 50744 - DNA, 20 bp, synthetic construct
  misc_feature 1..20: note = chemically synthesized
  source 1..20: mol_type = other DNA
acaaatgccccatgaatggc

SEQ ID NO: 50745 - DNA, 20 bp, synthetic construct
  misc_feature 1..20: note = chemically synthesized
  source 1..20: mol_type = other DNA
aatgccccatgaatggcagg

SEQ ID NO: 50746 - DNA, 20 bp, synthetic construct
  misc_feature 1..20: note = chemically synthesized
  source 1..20: mol_type = other DNA
gccccatgaatggcaggcag

SEQ ID NO: 50747 - DNA, 20 bp, synthetic construct
  misc_feature 1..20: note = chemically synthesized
  source 1..20: mol_type = other DNA
catgaatggcaggcagaagt

SEQ ID NO: 50748 - DNA, 20 bp, synthetic construct
  misc_feature 1..20: note = chemically synthesized
  source 1..20: mol_type = other DNA
tgaatggcaggcagaagtta

SEQ ID NO: 50749 - DNA, 20 bp, synthetic construct
  misc_feature 1..20: note = chemically synthesized
  source 1..20: mol_type = other DNA
caggcagaagttagagtatg

SEQ ID NO: 50750 - DNA, 20 bp, synthetic construct
  misc_feature 1..20: note = chemically synthesized
  source 1..20: mol_type = other DNA
aggcagaagttagagtatga

SEQ ID NO: 50751 - DNA, 20 bp, synthetic construct
  misc_feature 1..20: note = chemically synthesized
  source 1..20: mol_type = other DNA
ggcagaagttagagtatgaa

SEQ ID NO: 50752 - DNA, 20 bp, synthetic construct
  misc_feature 1..20: note = chemically synthesized
  source 1..20: mol_type = other DNA
gcagaagttagagtatgaag

SEQ ID NO: 50753 - DNA, 20 bp, synthetic construct
  misc_feature 1..20: note = chemically synthesized
  source 1..20: mol_type = other DNA
cagaagttagagtatgaagg

SEQ ID NO: 50754 - DNA, 20 bp, synthetic construct
  misc_feature 1..20: note = chemically synthesized
  source 1..20: mol_type = other DNA
gtatgaagggggccccacct

SEQ ID NO: 50755 - DNA, 20 bp, synthetic construct
  misc_feature 1..20: note = chemically synthesized
  source 1..20: mol_type = other DNA
tatgaagggggccccacctc

SEQ ID NO: 50756 - DNA, 20 bp, synthetic construct
  misc_feature 1..20: note = chemically synthesized
  source 1..20: mol_type = other DNA
tgaagggggccccacctcag

SEQ ID NO: 50757 - DNA, 20 bp, synthetic construct
  misc_feature 1..20: note = chemically synthesized
  source 1..20: mol_type = other DNA
gaagggggccccacctcagg

SEQ ID NO: 50758 - DNA, 20 bp, synthetic construct
  misc_feature 1..20: note = chemically synthesized
  source 1..20: mol_type = other DNA
ggggccccacctcaggaggt

SEQ ID NO: 50759 - DNA, 20 bp, synthetic construct
  misc_feature 1..20: note = chemically synthesized
  source 1..20: mol_type = other DNA
gggccccacctcaggaggtc

SEQ ID NO: 50760 - DNA, 20 bp, synthetic construct
  misc_feature 1..20: note = chemically synthesized
  source 1..20: mol_type = other DNA
ggccccacctcaggaggtcg

SEQ ID NO: 50761 - DNA, 20 bp, synthetic construct
  misc_feature 1..20: note = chemically synthesized
  source 1..20: mol_type = other DNA
ccccacctcaggaggtcggg

SEQ ID NO: 50762 - DNA, 20 bp, synthetic construct
  misc_feature 1..20: note = chemically synthesized
  source 1..20: mol_type = other DNA
cctcaggaggtcggggagtg

SEQ ID NO: 50763 - DNA, 20 bp, synthetic construct
  misc_feature 1..20: note = chemically synthesized
  source 1..20: mol_type = other DNA
gaggtcggggagtgtggcgt

SEQ ID NO: 50764 - DNA, 20 bp, synthetic construct
  misc_feature 1..20: note = chemically synthesized
  source 1..20: mol_type = other DNA
tggcgtcagccactgcccca

SEQ ID NO: 50765 - DNA, 20 bp, synthetic construct
  misc_feature 1..20: note = chemically synthesized
  source 1..20: mol_type = other DNA
cgtcagccactgccccatag

SEQ ID NO: 50766 - DNA, 20 bp, synthetic construct
  misc_feature 1..20: note = chemically synthesized
  source 1..20: mol_type = other DNA
gtcagccactgccccatagc

SEQ ID NO: 50767 - DNA, 20 bp, synthetic construct
  misc_feature 1..20: note = chemically synthesized
  source 1..20: mol_type = other DNA
atgtgtgcaacatctgccac

SEQ ID NO: 50768 - DNA, 20 bp, synthetic construct
  misc_feature 1..20: note = chemically synthesized
  source 1..20: mol_type = other DNA
caacatctgccactggtact

SEQ ID NO: 50769 - DNA, 20 bp, synthetic construct
  misc_feature 1..20: note = chemically synthesized
  source 1..20: mol_type = other DNA
tgaccctcatttgaccctcc

SEQ ID NO: 50770 - DNA, 20 bp, synthetic construct
  misc_feature 1..20: note = chemically synthesized
  source 1..20: mol_type = other DNA
gaccctcatttgaccctccc

SEQ ID NO: 50771 - DNA, 20 bp, synthetic construct
  misc_feature 1..20: note = chemically synthesized
  source 1..20: mol_type = other DNA
ctcatttgaccctcccaggc

SEQ ID NO: 50772 - DNA, 20 bp, synthetic construct
  misc_feature 1..20: note = chemically synthesized
  source 1..20: mol_type = other DNA
tgctgtgatgaccccctccc

SEQ ID NO: 50773 - DNA, 20 bp, synthetic construct
  misc_feature 1..20: note = chemically synthesized
  source 1..20: mol_type = other DNA
gtgatgaccccctccctggt

SEQ ID NO: 50774 - DNA, 20 bp, synthetic construct
  misc_feature 1..20: note = chemically synthesized
  source 1..20: mol_type = other DNA
tgatgaccccctccctggtg

SEQ ID NO: 50775 - DNA, 20 bp, synthetic construct
  misc_feature 1..20: note = chemically synthesized
  source 1..20: mol_type = other DNA
atgaccccctccctggtgag

SEQ ID NO: 50776 - DNA, 20 bp, synthetic construct
  misc_feature 1..20: note = chemically synthesized
  source 1..20: mol_type = other DNA
ccccctccctggtgaggagc

SEQ ID NO: 50777 - DNA, 20 bp, synthetic construct
  misc_feature 1..20: note = chemically synthesized
  source 1..20: mol_type = other DNA
ctccctggtgaggagccggc

SEQ ID NO: 50778 - DNA, 20 bp, synthetic construct
  misc_feature 1..20: note = chemically synthesized
  source 1..20: mol_type = other DNA
tccctggtgaggagccggcc

SEQ ID NO: 50779 - DNA, 20 bp, synthetic construct
  misc_feature 1..20: note = chemically synthesized
  source 1..20: mol_type = other DNA
gtgaggagccggccaggact

SEQ ID NO: 50780 - DNA, 20 bp, synthetic construct
  misc_feature 1..20: note = chemically synthesized
  source 1..20: mol_type = other DNA
gccggccaggacttggatcc

SEQ ID NO: 50781 - DNA, 20 bp, synthetic construct
  misc_feature 1..20: note = chemically synthesized
  source 1..20: mol_type = other DNA
ggccaggacttggatccaag

SEQ ID NO: 50782 - DNA, 20 bp, synthetic construct
  misc_feature 1..20: note = chemically synthesized
  source 1..20: mol_type = other DNA
ggacttggatccaagaagtc

SEQ ID NO: 50783 - DNA, 20 bp, synthetic construct
  misc_feature 1..20: note = chemically synthesized
  source 1..20: mol_type = other DNA
cccatgctctgaccgctcga

SEQ ID NO: 50784 - DNA, 20 bp, synthetic construct
  misc_feature 1..20: note = chemically synthesized
  source 1..20: mol_type = other DNA
gctcgatggcaccgcttcct

SEQ ID NO: 50785 - DNA, 20 bp, synthetic construct
  misc_feature 1..20: note = chemically synthesized
  source 1..20: mol_type = other DNA
cgatggcaccgcttccttgg

SEQ ID NO: 50786 - DNA, 20 bp, synthetic construct
  misc_feature 1..20: note = chemically synthesized
  source 1..20: mol_type = other DNA
gatggcaccgcttccttggc

SEQ ID NO: 50787 - DNA, 20 bp, synthetic construct
  misc_feature 1..20: note = chemically synthesized
  source 1..20: mol_type = other DNA
cttccttggcaggacatcta

SEQ ID NO: 50788 - DNA, 20 bp, synthetic construct
  misc_feature 1..20: note = chemically synthesized
  source 1..20: mol_type = other DNA
ggcaggacatctacagctcc

SEQ ID NO: 50789 - DNA, 20 bp, synthetic construct
  misc_feature 1..20: note = chemically synthesized
  source 1..20: mol_type = other DNA
gcaggacatctacagctccc

SEQ ID NO: 50790 - DNA, 20 bp, synthetic construct
  misc_feature 1..20: note = chemically synthesized
  source 1..20: mol_type = other DNA
caggacatctacagctccca

SEQ ID NO: 50791 - DNA, 20 bp, synthetic construct
  misc_feature 1..20: note = chemically synthesized
  source 1..20: mol_type = other DNA
tctacagctcccagggcacc

SEQ ID NO: 50792 - DNA, 20 bp, synthetic construct
  misc_feature 1..20: note = chemically synthesized
  source 1..20: mol_type = other DNA
ctacagctcccagggcaccc

SEQ ID NO: 50793 - DNA, 20 bp, synthetic construct
  misc_feature 1..20: note = chemically synthesized
  source 1..20: mol_type = other DNA
tacagctcccagggcaccca

SEQ ID NO: 50794 - DNA, 20 bp, synthetic construct
  misc_feature 1..20: note = chemically synthesized
  source 1..20: mol_type = other DNA
acagctcccagggcacccag

SEQ ID NO: 50795 - DNA, 20 bp, synthetic construct
  misc_feature 1..20: note = chemically synthesized
  source 1..20: mol_type = other DNA
ccagggcacccaggggacat

SEQ ID NO: 50796 - DNA, 20 bp, synthetic construct
  misc_feature 1..20: note = chemically synthesized
  source 1..20: mol_type = other DNA
caggggacatcagcctctga

SEQ ID NO: 50797 - DNA, 20 bp, synthetic construct
  misc_feature 1..20: note = chemically synthesized
  source 1..20: mol_type = other DNA
aggggacatcagcctctgaa

SEQ ID NO: 50798 - DNA, 20 bp, synthetic construct
  misc_feature 1..20: note = chemically synthesized
  source 1..20: mol_type = other DNA
ggggacatcagcctctgaaa

SEQ ID NO: 50799 - DNA, 20 bp, synthetic construct
  misc_feature 1..20: note = chemically synthesized
  source 1..20: mol_type = other DNA
gggacatcagcctctgaaag

SEQ ID NO: 50800 - DNA, 20 bp, synthetic construct
  misc_feature 1..20: note = chemically synthesized
  source 1..20: mol_type = other DNA
atcagcctctgaaaggggaa

SEQ ID NO: 50801 - DNA, 20 bp, synthetic construct
  misc_feature 1..20: note = chemically synthesized
  source 1..20: mol_type = other DNA
gcctctgaaaggggaatggt

SEQ ID NO: 50802 - DNA, 20 bp, synthetic construct
  misc_feature 1..20: note = chemically synthesized
  source 1..20: mol_type = other DNA
gaaaggggaatggtcagacc

SEQ ID NO: 50803 - DNA, 20 bp, synthetic construct
  misc_feature 1..20: note = chemically synthesized
  source 1..20: mol_type = other DNA
aaaggggaatggtcagaccc

SEQ ID NO: 50804 - DNA, 20 bp, synthetic construct
  misc_feature 1..20: note = chemically synthesized
  source 1..20: mol_type = other DNA
aggggaatggtcagacccgg

SEQ ID NO: 50805 - DNA, 20 bp, synthetic construct
  misc_feature 1..20: note = chemically synthesized
  source 1..20: mol_type = other DNA
ggggaatggtcagacccggg

SEQ ID NO: 50806 - DNA, 20 bp, synthetic construct
  misc_feature 1..20: note = chemically synthesized
  source 1..20: mol_type = other DNA
gaggccttgaatgccatgct

SEQ ID NO: 50807 - DNA, 20 bp, synthetic construct
  misc_feature 1..20: note = chemically synthesized
  source 1..20: mol_type = other DNA
aggccttgaatgccatgcta

SEQ ID NO: 50808 - DNA, 20 bp, synthetic construct
  misc_feature 1..20: note = chemically synthesized
  source 1..20: mol_type = other DNA
gccttgaatgccatgctaag

SEQ ID NO: 50809 - DNA, 20 bp, synthetic construct
  misc_feature 1..20: note = chemically synthesized
  source 1..20: mol_type = other DNA
gaatgccatgctaaggagtt

SEQ ID NO: 50810 - DNA, 20 bp, synthetic construct
  misc_feature 1..20: note = chemically synthesized
  source 1..20: mol_type = other DNA
ctaaggagttcggacttgac

SEQ ID NO: 50811 - DNA, 20 bp, synthetic construct
  misc_feature 1..20: note = chemically synthesized
  source 1..20: mol_type = other DNA
aaggagttcggacttgacaa

SEQ ID NO: 50812 - DNA, 20 bp, synthetic construct
  misc_feature 1..20: note = chemically synthesized
  source 1..20: mol_type = other DNA
aggagttcggacttgacaag

SEQ ID NO: 50813 - DNA, 20 bp, synthetic construct
  misc_feature 1..20: note = chemically synthesized
  source 1..20: mol_type = other DNA
agttcggacttgacaagagg

SEQ ID NO: 50814 - DNA, 20 bp, synthetic construct
  misc_feature 1..20: note = chemically synthesized
  source 1..20: mol_type = other DNA
tcggacttgacaagaggcag

SEQ ID NO: 50815 - DNA, 20 bp, synthetic construct
  misc_feature 1..20: note = chemically synthesized
  source 1..20: mol_type = other DNA
cttgacaagaggcagcagca

SEQ ID NO: 50816 - DNA, 20 bp, synthetic construct
  misc_feature 1..20: note = chemically synthesized
  source 1..20: mol_type = other DNA
ttgacaagaggcagcagcaa

SEQ ID NO: 50817 - DNA, 20 bp, synthetic construct
  misc_feature 1..20: note = chemically synthesized
  source 1..20: mol_type = other DNA
tgacaagaggcagcagcaaa

SEQ ID NO: 50818 - DNA, 20 bp, synthetic construct
  misc_feature 1..20: note = chemically synthesized
  source 1..20: mol_type = other DNA
agcaaagggttttgataacc

SEQ ID NO: 50819 - DNA, 20 bp, synthetic construct
  misc_feature 1..20: note = chemically synthesized
  source 1..20: mol_type = other DNA
aagggttttgataacctggt

SEQ ID NO: 50820 - DNA, 20 bp, synthetic construct
  misc_feature 1..20: note = chemically synthesized
  source 1..20: mol_type = other DNA
ttattgtatttcactgctgc

SEQ ID NO: 50821 - DNA, 20 bp, synthetic construct
  misc_feature 1..20: note = chemically synthesized
  source 1..20: mol_type = other DNA
ttcactgctgcaagatttac

SEQ ID NO: 50822 - DNA, 20 bp, synthetic construct
  misc_feature 1..20: note = chemically synthesized
  source 1..20: mol_type = other DNA
gctgcaagatttactggaca

SEQ ID NO: 50823 - DNA, 20 bp, synthetic construct
  misc_feature 1..20: note = chemically synthesized
  source 1..20: mol_type = other DNA
tgcaagatttactggacaaa

SEQ ID NO: 50824 - DNA, 20 bp, synthetic construct
  misc_feature 1..20: note = chemically synthesized
  source 1..20: mol_type = other DNA
gcaagatttactggacaaag

SEQ ID NO: 50825 - DNA, 20 bp, synthetic construct
  misc_feature 1..20: note = chemically synthesized
  source 1..20: mol_type = other DNA
aagatttactggacaaagag

SEQ ID NO: 50826 - DNA, 20 bp, synthetic construct
  misc_feature 1..20: note = chemically synthesized
  source 1..20: mol_type = other DNA
agatttactggacaaagagg

SEQ ID NO: 50827 - DNA, 20 bp, synthetic construct
  misc_feature 1..20: note = chemically synthesized
  source 1..20: mol_type = other DNA
atttactggacaaagaggag

SEQ ID NO: 50828 - DNA, 20 bp, synthetic construct
  misc_feature 1..20: note = chemically synthesized
  source 1..20: mol_type = other DNA
tttactggacaaagaggagg

SEQ ID NO: 50829 - DNA, 20 bp, synthetic construct
  misc_feature 1..20: note = chemically synthesized
  source 1..20: mol_type = other DNA
ttactggacaaagaggagga

SEQ ID NO: 50830 - DNA, 20 bp, synthetic construct
  misc_feature 1..20: note = chemically synthesized
  source 1..20: mol_type = other DNA
tactggacaaagaggaggag

SEQ ID NO: 50831 - DNA, 20 bp, synthetic construct
  misc_feature 1..20: note = chemically synthesized
  source 1..20: mol_type = other DNA
actggacaaagaggaggagg

SEQ ID NO: 50832 - DNA, 20 bp, synthetic construct
  misc_feature 1..20: note = chemically synthesized
  source 1..20: mol_type = other DNA
tggacaaagaggaggagggg

SEQ ID NO: 50833 - DNA, 20 bp, synthetic construct
  misc_feature 1..20: note = chemically synthesized
  source 1..20: mol_type = other DNA
acaaagaggaggagggggag

SEQ ID NO: 50834 - DNA, 20 bp, synthetic construct
  misc_feature 1..20: note = chemically synthesized
  source 1..20: mol_type = other DNA
agaggaggagggggagaaga

SEQ ID NO: 50835 - DNA, 20 bp, synthetic construct
  misc_feature 1..20: note = chemically synthesized
  source 1..20: mol_type = other DNA
gaggagggggagaagacagt

SEQ ID NO: 50836 - DNA, 20 bp, synthetic construct
  misc_feature 1..20: note = chemically synthesized
  source 1..20: mol_type = other DNA
gggggagaagacagtgagtg

SEQ ID NO: 50837 - DNA, 20 bp, synthetic construct
  misc_feature 1..20: note = chemically synthesized
  source 1..20: mol_type = other DNA
gaagacagtgagtgcagtga

SEQ ID NO: 50838 - DNA, 20 bp, synthetic construct
  misc_feature 1..20: note = chemically synthesized
  source 1..20: mol_type = other DNA
aagacagtgagtgcagtgaa

SEQ ID NO: 50839 - DNA, 20 bp, synthetic construct
  misc_feature 1..20: note = chemically synthesized
  source 1..20: mol_type = other DNA
tgagtgcagtgaaaggtgtc

SEQ ID NO: 50840 - DNA, 20 bp, synthetic construct
  misc_feature 1..20: note = chemically synthesized
  source 1..20: mol_type = other DNA
gtgcagtgaaaggtgtctag

SEQ ID NO: 50841 - DNA, 20 bp, synthetic construct
  misc_feature 1..20: note = chemically synthesized
  source 1..20: mol_type = other DNA
tgaaaggtgtctagaagccc

SEQ ID NO: 50842 - DNA, 20 bp, synthetic construct
  misc_feature 1..20: note = chemically synthesized
  source 1..20: mol_type = other DNA
ggtgtctagaagcccaagca

SEQ ID NO: 50843 - DNA, 20 bp, synthetic construct
  misc_feature 1..20: note = chemically synthesized
  source 1..20: mol_type = other DNA
gtgtctagaagcccaagcaa

SEQ ID NO: 50844 - DNA, 20 bp, synthetic construct
  misc_feature 1..20: note = chemically synthesized
  source 1..20: mol_type = other DNA
ctagaagcccaagcaaaggc

SEQ ID NO: 50845 - DNA, 20 bp, synthetic construct
  misc_feature 1..20: note = chemically synthesized
  source 1..20: mol_type = other DNA
tagaagcccaagcaaaggcc

SEQ ID NO: 50846 - DNA, 20 bp, synthetic construct
  misc_feature 1..20: note = chemically synthesized
  source 1..20: mol_type = other DNA
agaagcccaagcaaaggcca

SEQ ID NO: 50847 - DNA, 20 bp, synthetic construct
  misc_feature 1..20: note = chemically synthesized
  source 1..20: mol_type = other DNA
gaagcccaagcaaaggccag

SEQ ID NO: 50848 - DNA, 20 bp, synthetic construct
  misc_feature 1..20: note = chemically synthesized
  source 1..20: mol_type = other DNA
gcccaagcaaaggccagggg

SEQ ID NO: 50849 - DNA, 20 bp, synthetic construct
  misc_feature 1..20: note = chemically synthesized
  source 1..20: mol_type = other DNA
cccaagcaaaggccaggggt

SEQ ID NO: 50850 - DNA, 20 bp, synthetic construct
  misc_feature 1..20: note = chemically synthesized
  source 1..20: mol_type = other DNA
ccaagcaaaggccaggggtg

SEQ ID NO: 50851 - DNA, 20 bp, synthetic construct
  misc_feature 1..20: note = chemically synthesized
  source 1..20: mol_type = other DNA
caaaggccaggggtggggcg

SEQ ID NO: 50852 - DNA, 20 bp, synthetic construct
  misc_feature 1..20: note = chemically synthesized
  source 1..20: mol_type = other DNA
aaggccaggggtggggcgta

SEQ ID NO: 50853 - DNA, 20 bp, synthetic construct
  misc_feature 1..20: note = chemically synthesized
  source 1..20: mol_type = other DNA
ggccaggggtggggcgtaga

SEQ ID NO: 50854 - DNA, 20 bp, synthetic construct
  misc_feature 1..20: note = chemically synthesized
  source 1..20: mol_type = other DNA
gccaggggtggggcgtagag

SEQ ID NO: 50855 - DNA, 20 bp, synthetic construct
  misc_feature 1..20: note = chemically synthesized
  source 1..20: mol_type = other DNA
ggtggggcgtagagaggcaa

SEQ ID NO: 50856 - DNA, 20 bp, synthetic construct
  misc_feature 1..20: note = chemically synthesized
  source 1..20: mol_type = other DNA
gggcgtagagaggcaatgga

SEQ ID NO: 50857 - DNA, 20 bp, synthetic construct
  misc_feature 1..20: note = chemically synthesized
  source 1..20: mol_type = other DNA
ggcgtagagaggcaatggaa

SEQ ID NO: 50858 - DNA, 20 bp, synthetic construct
  misc_feature 1..20: note = chemically synthesized
  source 1..20: mol_type = other DNA
agaggcaatggaaaggcacc

SEQ ID NO: 50859 - DNA, 20 bp, synthetic construct
  misc_feature 1..20: note = chemically synthesized
  source 1..20: mol_type = other DNA
tggaaaggcacccagacacc

SEQ ID NO: 50860 - DNA, 20 bp, synthetic construct
  misc_feature 1..20: note = chemically synthesized
  source 1..20: mol_type = other DNA
ggaaaggcacccagacaccc

SEQ ID NO: 50861 - DNA, 20 bp, synthetic construct
  misc_feature 1..20: note = chemically synthesized
  source 1..20: mol_type = other DNA
cacccagacacccaggcttc

SEQ ID NO: 50862 - DNA, 20 bp, synthetic construct
  misc_feature 1..20: note = chemically synthesized
  source 1..20: mol_type = other DNA
gacacccaggcttccagcct

SEQ ID NO: 50863 - DNA, 20 bp, synthetic construct
  misc_feature 1..20: note = chemically synthesized
  source 1..20: mol_type = other DNA
ccaggcttccagcctgagcg

SEQ ID NO: 50864 - DNA, 20 bp, synthetic construct
  misc_feature 1..20: note = chemically synthesized
  source 1..20: mol_type = other DNA
aggcttccagcctgagcgcg

SEQ ID NO: 50865 - DNA, 20 bp, synthetic construct
  misc_feature 1..20: note = chemically synthesized
  source 1..20: mol_type = other DNA
gcctgagcgcggagtgcatg

SEQ ID NO: 50866 - DNA, 20 bp, synthetic construct
  misc_feature 1..20: note = chemically synthesized
  source 1..20: mol_type = other DNA
cctgagcgcggagtgcatgc

SEQ ID NO: 50867 - DNA, 20 bp, synthetic construct
  misc_feature 1..20: note = chemically synthesized
  source 1..20: mol_type = other DNA
cggagtgcatgcaggctgcg

SEQ ID NO: 50868 - DNA, 20 bp, synthetic construct
  misc_feature 1..20: note = chemically synthesized
  source 1..20: mol_type = other DNA
agtgcatgcaggctgcgcgg

SEQ ID NO: 50869 - DNA, 20 bp, synthetic construct
  misc_feature 1..20: note = chemically synthesized
  source 1..20: mol_type = other DNA
caggctgcgcggtggccgcc

SEQ ID NO: 50870 - DNA, 20 bp, synthetic construct
  misc_feature 1..20: note = chemically synthesized
  source 1..20: mol_type = other DNA
aggctgcgcggtggccgccc

SEQ ID NO: 50871 - DNA, 20 bp, synthetic construct
  misc_feature 1..20: note = chemically synthesized
  source 1..20: mol_type = other DNA
cgcggtggccgcccgggttg

SEQ ID NO: 50872 - DNA, 20 bp, synthetic construct
  misc_feature 1..20: note = chemically synthesized
  source 1..20: mol_type = other DNA
gcggtggccgcccgggttgc

SEQ ID NO: 50873 - DNA, 20 bp, synthetic construct
  misc_feature 1..20: note = chemically synthesized
  source 1..20: mol_type = other DNA
cggtggccgcccgggttgca

SEQ ID NO: 50874 - DNA, 20 bp, synthetic construct
  misc_feature 1..20: note = chemically synthesized
  source 1..20: mol_type = other DNA
cccgggttgcagggaacgcg

SEQ ID NO: 50875 - DNA, 20 bp, synthetic construct
  misc_feature 1..20: note = chemically synthesized
  source 1..20: mol_type = other DNA
ccgggttgcagggaacgcgc

SEQ ID NO: 50876 - DNA, 20 bp, synthetic construct
  misc_feature 1..20: note = chemically synthesized
  source 1..20: mol_type = other DNA
gttgcagggaacgcgcgggc

SEQ ID NO: 50877 - DNA, 20 bp, synthetic construct
  misc_feature 1..20: note = chemically synthesized
  source 1..20: mol_type = other DNA
cgcgcgggccagcgactctg

SEQ ID NO: 50878 - DNA, 20 bp, synthetic construct
  misc_feature 1..20: note = chemically synthesized
  source 1..20: mol_type = other DNA
accccgtgcccgcactcacc

SEQ ID NO: 50879 - DNA, 20 bp, synthetic construct
  misc_feature 1..20: note = chemically synthesized
  source 1..20: mol_type = other DNA
ccccgtgcccgcactcaccc

SEQ ID NO: 50880 - DNA, 20 bp, synthetic construct
  misc_feature 1..20: note = chemically synthesized
  source 1..20: mol_type = other DNA
gtgcccgcactcacccagga

SEQ ID NO: 50881 - DNA, 20 bp, synthetic construct
  misc_feature 1..20: note = chemically synthesized
  source 1..20: mol_type = other DNA
cgcactcacccaggacggcg

SEQ ID NO: 50882 - DNA, 20 bp, synthetic construct
  misc_feature 1..20: note = chemically synthesized
  source 1..20: mol_type = other DNA
tcacccaggacggcgcagac

SEQ ID NO: 50883 - DNA, 20 bp, synthetic construct
  misc_feature 1..20: note = chemically synthesized
  source 1..20: mol_type = other DNA
cccaggacggcgcagaccag

SEQ ID NO: 50884 - DNA, 20 bp, synthetic construct
  misc_feature 1..20: note = chemically synthesized
  source 1..20: mol_type = other DNA
ccaggacggcgcagaccagc

SEQ ID NO: 50885 - DNA, 20 bp, synthetic construct
  misc_feature 1..20: note = chemically synthesized
  source 1..20: mol_type = other DNA
caggacggcgcagaccagca

SEQ ID NO: 50886 - DNA, 20 bp, synthetic construct
  misc_feature 1..20: note = chemically synthesized
  source 1..20: mol_type = other DNA
gcagaccagcagggctccca

SEQ ID NO: 50887 - DNA, 20 bp, synthetic construct
  misc_feature 1..20: note = chemically synthesized
  source 1..20: mol_type = other DNA
accagcagggctcccacggc

SEQ ID NO: 50888 - DNA, 20 bp, synthetic construct
  misc_feature 1..20: note = chemically synthesized
  source 1..20: mol_type = other DNA
ccacggcgagcctcatcttc

SEQ ID NO: 50889 - DNA, 20 bp, synthetic construct
  misc_feature 1..20: note = chemically synthesized
  source 1..20: mol_type = other DNA
cacggcgagcctcatcttcc

SEQ ID NO: 50890 - DNA, 20 bp, synthetic construct
  misc_feature 1..20: note = chemically synthesized
  source 1..20: mol_type = other DNA
cgagcctcatcttccgggtg

SEQ ID NO: 50891 - DNA, 20 bp, synthetic construct
  misc_feature 1..20: note = chemically synthesized
  source 1..20: mol_type = other DNA
catcttccgggtgcggcgct

SEQ ID NO: 50892 - DNA, 20 bp, synthetic construct
  misc_feature 1..20: note = chemically synthesized
  source 1..20: mol_type = other DNA
cttccgggtgcggcgctgag

SEQ ID NO: 50893 - DNA, 20 bp, synthetic construct
  misc_feature 1..20: note = chemically synthesized
  source 1..20: mol_type = other DNA
cgggtgcggcgctgagcagc

SEQ ID NO: 50894 - DNA, 20 bp, synthetic construct
  misc_feature 1..20: note = chemically synthesized
  source 1..20: mol_type = other DNA
gcggcgctgagcagcgagca

SEQ ID NO: 50895 - DNA, 20 bp, synthetic construct
  misc_feature 1..20: note = chemically synthesized
  source 1..20: mol_type = other DNA
cgctgagcagcgagcacagt

SEQ ID NO: 50896 - DNA, 20 bp, synthetic construct
  misc_feature 1..20: note = chemically synthesized
  source 1..20: mol_type = other DNA
cagtcggactcgcttctgtg

SEQ ID NO: 50897 - DNA, 20 bp, synthetic construct
  misc_feature 1..20: note = chemically synthesized
  source 1..20: mol_type = other DNA
actcgcttctgtgcagcctc

SEQ ID NO: 50898 - DNA, 20 bp, synthetic construct
  misc_feature 1..20: note = chemically synthesized
  source 1..20: mol_type = other DNA
gcgtccctttattccattcc

SEQ ID NO: 50899 - DNA, 20 bp, synthetic construct
  misc_feature 1..20: note = chemically synthesized
  source 1..20: mol_type = other DNA
cctttattccattcccggcc

SEQ ID NO: 50900 - DNA, 20 bp, synthetic construct
  misc_feature 1..20: note = chemically synthesized
  source 1..20: mol_type = other DNA
ctttattccattcccggcct

SEQ ID NO: 50901 - DNA, 20 bp, synthetic construct
  misc_feature 1..20: note = chemically synthesized
  source 1..20: mol_type = other DNA
tattccattcccggcctggg

SEQ ID NO: 50902 - DNA, 20 bp, synthetic construct
  misc_feature 1..20: note = chemically synthesized
  source 1..20: mol_type = other DNA
attccattcccggcctgggc

SEQ ID NO: 50903 - DNA, 20 bp, synthetic construct
  misc_feature 1..20: note = chemically synthesized
  source 1..20: mol_type = other DNA
cattcccggcctgggcgggc

SEQ ID NO: 50904 - DNA, 20 bp, synthetic construct
  misc_feature 1..20: note = chemically synthesized
  source 1..20: mol_type = other DNA
attcccggcctgggcgggct

SEQ ID NO: 50905 - DNA, 20 bp, synthetic construct
  misc_feature 1..20: note = chemically synthesized
  source 1..20: mol_type = other DNA
tttgacctcccgtgtttgtg

SEQ ID NO: 50906 - DNA, 20 bp, synthetic construct
  misc_feature 1..20: note = chemically synthesized
  source 1..20: mol_type = other DNA
acctcccgtgtttgtgcagc

SEQ ID NO: 50907 - DNA, 20 bp, synthetic construct
  misc_feature 1..20: note = chemically synthesized
  source 1..20: mol_type = other DNA
cctcccgtgtttgtgcagcc

SEQ ID NO: 50908 - DNA, 20 bp, synthetic construct
  misc_feature 1..20: note = chemically synthesized
  source 1..20: mol_type = other DNA
cactgatcacctcattttct

SEQ ID NO: 50909 - DNA, 20 bp, synthetic construct
  misc_feature 1..20: note = chemically synthesized
  source 1..20: mol_type = other DNA
tcacctcattttctgagctc

SEQ ID NO: 50910 - DNA, 20 bp, synthetic construct
  misc_feature 1..20: note = chemically synthesized
  source 1..20: mol_type = other DNA
acctcattttctgagctctg

SEQ ID NO: 50911 - DNA, 20 bp, synthetic construct
  misc_feature 1..20: note = chemically synthesized
  source 1..20: mol_type = other DNA
gagctctggagacgacccgc

SEQ ID NO: 50912 - DNA, 20 bp, synthetic construct
  misc_feature 1..20: note = chemically synthesized
  source 1..20: mol_type = other DNA
ctctggagacgacccgcgag

SEQ ID NO: 50913 - DNA, 20 bp, synthetic construct
  misc_feature 1..20: note = chemically synthesized
  source 1..20: mol_type = other DNA
tggagacgacccgcgagtgg

SEQ ID NO: 50914 - DNA, 20 bp, synthetic construct
  misc_feature 1..20: note = chemically synthesized
  source 1..20: mol_type = other DNA
ggagacgacccgcgagtgga

SEQ ID NO: 50915 - DNA, 20 bp, synthetic construct
  misc_feature 1..20: note = chemically synthesized
  source 1..20: mol_type = other DNA
agacgacccgcgagtggaag

SEQ ID NO: 50916 - DNA, 20 bp, synthetic construct
  misc_feature 1..20: note = chemically synthesized
  source 1..20: mol_type = other DNA
acccgcgagtggaaggagtc

SEQ ID NO: 50917 - DNA, 20 bp, synthetic construct
  misc_feature 1..20: note = chemically synthesized
  source 1..20: mol_type = other DNA
cgagtggaaggagtccagca

SEQ ID NO: 50918 - DNA, 20 bp, synthetic construct
  misc_feature 1..20: note = chemically synthesized
  source 1..20: mol_type = other DNA
gtccagcacagaaatgttga

SEQ ID NO: 50919 - DNA, 20 bp, synthetic construct
  misc_feature 1..20: note = chemically synthesized
  source 1..20: mol_type = other DNA
tccagcacagaaatgttgat

SEQ ID NO: 50920 - DNA, 20 bp, synthetic construct
  misc_feature 1..20: note = chemically synthesized
  source 1..20: mol_type = other DNA
agcacagaaatgttgatggg

SEQ ID NO: 50921 - DNA, 20 bp, synthetic construct
  misc_feature 1..20: note = chemically synthesized
  source 1..20: mol_type = other DNA
gcacagaaatgttgatggga

SEQ ID NO: 50922 - DNA, 20 bp, synthetic construct
  misc_feature 1..20: note = chemically synthesized
  source 1..20: mol_type = other DNA
cacagaaatgttgatgggaa

SEQ ID NO: 50923 - DNA, 20 bp, synthetic construct
  misc_feature 1..20: note = chemically synthesized
  source 1..20: mol_type = other DNA
tgttgatgggaagggacatg

SEQ ID NO: 50924 - DNA, 20 bp, synthetic construct
  misc_feature 1..20: note = chemically synthesized
  source 1..20: mol_type = other DNA
aagggacatgaagcacaatg

SEQ ID NO: 50925 - DNA, 20 bp, synthetic construct
  misc_feature 1..20: note = chemically synthesized
  source 1..20: mol_type = other DNA
caatgcagccattgtcatcg

SEQ ID NO: 50926 - DNA, 20 bp, synthetic construct
  misc_feature 1..20: note = chemically synthesized
  source 1..20: mol_type = other DNA
cattgtcatcgcggctcgct

SEQ ID NO: 50927 - DNA, 20 bp, synthetic construct
  misc_feature 1..20: note = chemically synthesized
  source 1..20: mol_type = other DNA
gtgctggactccttccactc

SEQ ID NO: 50928 - DNA, 20 bp, synthetic construct
  misc_feature 1..20: note = chemically synthesized
  source 1..20: mol_type = other DNA
aaaatgaggtgatcagtggg

SEQ ID NO: 50929 - DNA, 20 bp, synthetic construct
  misc_feature 1..20: note = chemically synthesized
  source 1..20: mol_type = other DNA
cagtgggacgagtaaggaag

SEQ ID NO: 50930 - DNA, 20 bp, synthetic construct
  misc_feature 1..20: note = chemically synthesized
  source 1..20: mol_type = other DNA
gcgcccagcccgcccaggcc

SEQ ID NO: 50931 - DNA, 20 bp, synthetic construct
  misc_feature 1..20: note = chemically synthesized
  source 1..20: mol_type = other DNA
cagcccgcccaggccgggaa

SEQ ID NO: 50932 - DNA, 20 bp, synthetic construct
  misc_feature 1..20: note = chemically synthesized
  source 1..20: mol_type = other DNA
gcgccggaggctgcacagaa

SEQ ID NO: 50933 - DNA, 20 bp, synthetic construct
  misc_feature 1..20: note = chemically synthesized
  source 1..20: mol_type = other DNA
ccctgctggtctgcgccgtc

SEQ ID NO: 50934 - DNA, 20 bp, synthetic construct
  misc_feature 1..20: note = chemically synthesized
  source 1..20: mol_type = other DNA
gctggtctgcgccgtcctgg

SEQ ID NO: 50935 - DNA, 20 bp, synthetic construct
  misc_feature 1..20: note = chemically synthesized
  source 1..20: mol_type = other DNA
gtcctgggtgagtgcgggca

SEQ ID NO: 50936 - DNA, 20 bp, synthetic construct
  misc_feature 1..20: note = chemically synthesized
  source 1..20: mol_type = other DNA
gcgggcacggggtagcaccg

SEQ ID NO: 50937 - DNA, 20 bp, synthetic construct
  misc_feature 1..20: note = chemically synthesized
  source 1..20: mol_type = other DNA
tccgcgctcaggctggaagc

SEQ ID NO: 50938 - DNA, 20 bp, synthetic construct
  misc_feature 1..20: note = chemically synthesized
  source 1..20: mol_type = other DNA
caggctggaagcctgggtgt

SEQ ID NO: 50939 - DNA, 20 bp, synthetic construct
  misc_feature 1..20: note = chemically synthesized
  source 1..20: mol_type = other DNA
agcatggcattcaaggcctc

SEQ ID NO: 50940 - DNA, 20 bp, synthetic construct
  misc_feature 1..20: note = chemically synthesized
  source 1..20: mol_type = other DNA
ctttcagaggctgatgtccc

SEQ ID NO: 50941 - DNA, 20 bp, synthetic construct
  misc_feature 1..20: note = chemically synthesized
  source 1..20: mol_type = other DNA
gccatcgagcggtcagagca

SEQ ID NO: 50942 - DNA, 20 bp, synthetic construct
  misc_feature 1..20: note = chemically synthesized
  source 1..20: mol_type = other DNA
ggggtttgaagccagacttc

SEQ ID NO: 50943 - DNA, 20 bp, synthetic construct
  misc_feature 1..20: note = chemically synthesized
  source 1..20: mol_type = other DNA
ggccggctcctcaccaggga

SEQ ID NO: 50944 - DNA, 20 bp, synthetic construct
  misc_feature 1..20: note = chemically synthesized
  source 1..20: mol_type = other DNA
tcatcacagcacttgcctgg

SEQ ID NO: 50945 - DNA, 20 bp, synthetic construct
  misc_feature 1..20: note = chemically synthesized
  source 1..20: mol_type = other DNA
cttgcctgggagggtcaaat

SEQ ID NO: 50946 - DNA, 20 bp, synthetic construct
  misc_feature 1..20: note = chemically synthesized
  source 1..20: mol_type = other DNA
ggtcagcgaggtggcagatg

SEQ ID NO: 50947 - DNA, 20 bp, synthetic construct
  misc_feature 1..20: note = chemically synthesized
  source 1..20: mol_type = other DNA
cacaggcttatgttgcctcc

SEQ ID NO: 50948 - DNA, 20 bp, synthetic construct
  misc_feature 1..20: note = chemically synthesized
  source 1..20: mol_type = other DNA
catgggccaagagggaaaat

SEQ ID NO: 50949 - DNA, 20 bp, synthetic construct
  misc_feature 1..20: note = chemically synthesized
  source 1..20: mol_type = other DNA
agagggaaaatgggggtcgc

SEQ ID NO: 50950 - DNA, 20 bp, synthetic construct
  misc_feature 1..20: note = chemically synthesized
  source 1..20: mol_type = other DNA
gcctcctctccacaggcttt

SEQ ID NO: 50951 - DNA, 20 bp, synthetic construct
  misc_feature 1..20: note = chemically synthesized
  source 1..20: mol_type = other DNA
gtggatcttcttcagagcca

SEQ ID NO: 50952 - DNA, 20 bp, synthetic construct
  misc_feature 1..20: note = chemically synthesized
  source 1..20: mol_type = other DNA
ccttgctgtggtggcccaca

SEQ ID NO: 50953 - DNA, 20 bp, synthetic construct
  misc_feature 1..20: note = chemically synthesized
  source 1..20: mol_type = other DNA
agggcaaaagctcatgtgat

SEQ ID NO: 50954 - DNA, 20 bp, synthetic construct
  misc_feature 1..20: note = chemically synthesized
  source 1..20: mol_type = other DNA
gatgctgtctctgcaaccac

SEQ ID NO: 50955 - DNA, 20 bp, synthetic construct
  misc_feature 1..20: note = chemically synthesized
  source 1..20: mol_type = other DNA
ggctggcttcagcttttttt

SEQ ID NO: 50956 - DNA, 20 bp, synthetic construct
  misc_feature 1..20: note = chemically synthesized
  source 1..20: mol_type = other DNA
aaaaagtgtggtgaaaatgg

SEQ ID NO: 50957 - DNA, 20 bp, synthetic construct
  misc_feature 1..20: note = chemically synthesized
  source 1..20: mol_type = other DNA
tggagacagaggggagactg

SEQ ID NO: 50958 - DNA, 20 bp, synthetic construct
  misc_feature 1..20: note = chemically synthesized
  source 1..20: mol_type = other DNA
aggggagactgttgaatttg

SEQ ID NO: 50959 - DNA, 20 bp, synthetic construct
  misc_feature 1..20: note = chemically synthesized
  source 1..20: mol_type = other DNA
ctaaacagagagcaacagac

SEQ ID NO: 50960 - DNA, 20 bp, synthetic construct
  misc_feature 1..20: note = chemically synthesized
  source 1..20: mol_type = other DNA
ccctcaactactggccaaga

SEQ ID NO: 50961 - DNA, 20 bp, synthetic construct
  misc_feature 1..20: note = chemically synthesized
  source 1..20: mol_type = other DNA
ggccaagaaggggtgtaact

SEQ ID NO: 50962 - DNA, 20 bp, synthetic construct
  misc_feature 1..20: note = chemically synthesized
  source 1..20: mol_type = other DNA
atgttttcttcttttgtgcc

SEQ ID NO: 50963 - DNA, 20 bp, synthetic construct
  misc_feature 1..20: note = chemically synthesized
  source 1..20: mol_type = other DNA
tgtgccctgagtagcagacc

SEQ ID NO: 50964 - DNA, 20 bp, synthetic construct
  misc_feature 1..20: note = chemically synthesized
  source 1..20: mol_type = other DNA
ctggcttggccaacgacaag

SEQ ID NO: 50965 - DNA, 20 bp, synthetic construct
  misc_feature 1..20: note = chemically synthesized
  source 1..20: mol_type = other DNA
caacgacaagcagggtgacc

SEQ ID NO: 50966 - DNA, 20 bp, synthetic construct
  misc_feature 1..20: note = chemically synthesized
  source 1..20: mol_type = other DNA
aaaaaaaaaggcatcattct

SEQ ID NO: 50967 - DNA, 20 bp, synthetic construct
  misc_feature 1..20: note = chemically synthesized
  source 1..20: mol_type = other DNA
gaggtagcaagccaatgtgt

SEQ ID NO: 50968 - DNA, 20 bp, synthetic construct
  misc_feature 1..20: note = chemically synthesized
  source 1..20: mol_type = other DNA
cagtgatgggaggagacaag

SEQ ID NO: 50969 - DNA, 20 bp, synthetic construct
  misc_feature 1..20: note = chemically synthesized
  source 1..20: mol_type = other DNA
ctgcacccctctggccagca

SEQ ID NO: 50970 - DNA, 20 bp, synthetic construct
  misc_feature 1..20: note = chemically synthesized
  source 1..20: mol_type = other DNA
accttctattggctcagact

SEQ ID NO: 50971 - DNA, 20 bp, synthetic construct
  misc_feature 1..20: note = chemically synthesized
  source 1..20: mol_type = other DNA
gccctgtagtgttcatggac

SEQ ID NO: 50972 - DNA, 20 bp, synthetic construct
  misc_feature 1..20: note = chemically synthesized
  source 1..20: mol_type = other DNA
tgagaggaggacaggactga

SEQ ID NO: 50973 - DNA, 20 bp, synthetic construct
  misc_feature 1..20: note = chemically synthesized
  source 1..20: mol_type = other DNA
gctgtctctccctcagcata

SEQ ID NO: 50974 - DNA, 20 bp, synthetic construct
  misc_feature 1..20: note = chemically synthesized
  source 1..20: mol_type = other DNA
agcatgaggccactaagtgc

SEQ ID NO: 50975 - DNA, 20 bp, synthetic construct
  misc_feature 1..20: note = chemically synthesized
  source 1..20: mol_type = other DNA
cacaagcaacactgggacca

SEQ ID NO: 50976 - DNA, 20 bp, synthetic construct
  misc_feature 1..20: note = chemically synthesized
  source 1..20: mol_type = other DNA
gcaacactgggaccatcgga

SEQ ID NO: 50977 - DNA, 20 bp, synthetic construct
  misc_feature 1..20: note = chemically synthesized
  source 1..20: mol_type = other DNA
ggcacaagttctactgcatt

SEQ ID NO: 50978 - DNA, 20 bp, synthetic construct
  misc_feature 1..20: note = chemically synthesized
  source 1..20: mol_type = other DNA
gaccaccctctgctggccag

SEQ ID NO: 50979 - DNA, 20 bp, synthetic construct
  misc_feature 1..20: note = chemically synthesized
  source 1..20: mol_type = other DNA
ctatggaaaaccagcggggg

SEQ ID NO: 50980 - DNA, 20 bp, synthetic construct
  misc_feature 1..20: note = chemically synthesized
  source 1..20: mol_type = other DNA
ttgccatctttttgagaaga

SEQ ID NO: 50981 - DNA, 20 bp, synthetic construct
  misc_feature 1..20: note = chemically synthesized
  source 1..20: mol_type = other DNA
agaagagggagtgagactca

SEQ ID NO: 50982 - DNA, 20 bp, synthetic construct
  misc_feature 1..20: note = chemically synthesized
  source 1..20: mol_type = other DNA
gtcgttggccaagccaggcc

SEQ ID NO: 50983 - DNA, 20 bp, synthetic construct
  misc_feature 1..20: note = chemically synthesized
  source 1..20: mol_type = other DNA
ggccaagccaggcctagaat

SEQ ID NO: 50984 - DNA, 20 bp, synthetic construct
  misc_feature 1..20: note = chemically synthesized
  source 1..20: mol_type = other DNA
agaatctgggtctccagact

SEQ ID NO: 50985 - DNA, 20 bp, synthetic construct
  misc_feature 1..20: note = chemically synthesized
  source 1..20: mol_type = other DNA
gcacaaaagaagaaaacatt

SEQ ID NO: 50986 - DNA, 20 bp, synthetic construct
  misc_feature 1..20: note = chemically synthesized
  source 1..20: mol_type = other DNA
ccccttcttggccagtagtt

SEQ ID NO: 50987 - DNA, 20 bp, synthetic construct
  misc_feature 1..20: note = chemically synthesized
  source 1..20: mol_type = other DNA
gttgagggtaaattaacgaa

SEQ ID NO: 50988 - DNA, 20 bp, synthetic construct
  misc_feature 1..20: note = chemically synthesized
  source 1..20: mol_type = other DNA
aaaaaaagctgaagccagcc

SEQ ID NO: 50989 - DNA, 20 bp, synthetic construct
  misc_feature 1..20: note = chemically synthesized
  source 1..20: mol_type = other DNA
agaggaggcccacagctctc

SEQ ID NO: 50990 - DNA, 20 bp, synthetic construct
  misc_feature 1..20: note = chemically synthesized
  source 1..20: mol_type = other DNA
atgcatgaggaggggccacc

SEQ ID NO: 50991 - DNA, 20 bp, synthetic construct
  misc_feature 1..20: note = chemically synthesized
  source 1..20: mol_type = other DNA
cctccacaaagccctgcctc

SEQ ID NO: 50992 - DNA, 20 bp, synthetic construct
  misc_feature 1..20: note = chemically synthesized
  source 1..20: mol_type = other DNA
cctccagagttcccataggc

SEQ ID NO: 50993 - DNA, 20 bp, synthetic construct
  misc_feature 1..20: note = chemically synthesized
  source 1..20: mol_type = other DNA
gcctgtgaagtgctctgtgc

SEQ ID NO: 50994 - DNA, 20 bp, synthetic construct
  misc_feature 1..20: note = chemically synthesized
  source 1..20: mol_type = other DNA
ggggataaaggcaagtaacg

SEQ ID NO: 50995 - DNA, 20 bp, synthetic construct
  misc_feature 1..20: note = chemically synthesized
  source 1..20: mol_type = other DNA
taacgtggggtcctctctca

SEQ ID NO: 50996 - DNA, 20 bp, synthetic construct
  misc_feature 1..20: note = chemically synthesized
  source 1..20: mol_type = other DNA
aacagtgtgacaaatgcccc

SEQ ID NO: 50997 - DNA, 20 bp, synthetic construct
  misc_feature 1..20: note = chemically synthesized
  source 1..20: mol_type = other DNA
catgaatggcaggcagaagt

SEQ ID NO: 50998 - DNA, 20 bp, synthetic construct
  misc_feature 1..20: note = chemically synthesized
  source 1..20: mol_type = other DNA
ggccccacctcaggaggtcg

SEQ ID NO: 50999 - DNA, 20 bp, synthetic construct
  misc_feature 1..20: note = chemically synthesized
  source 1..20: mol_type = other DNA
cgtcagccactgccccatag

SEQ ID NO: 51000 - DNA, 20 bp, synthetic construct
  misc_feature 1..20: note = chemically synthesized
  source 1..20: mol_type = other DNA
ggtgaggagccggccaggac

SEQ ID NO: 51001 - DNA, 20 bp, synthetic construct
  misc_feature 1..20: note = chemically synthesized
  source 1..20: mol_type = other DNA
gggacatcagcctctgaaag

SEQ ID NO: 51002 - DNA, 20 bp, synthetic construct
  misc_feature 1..20: note = chemically synthesized
  source 1..20: mol_type = other DNA
atggtcagacccgggaggcc

SEQ ID NO: 51003 - DNA, 20 bp, synthetic construct
  misc_feature 1..20: note = chemically synthesized
  source 1..20: mol_type = other DNA
aggccttgaatgccatgcta

SEQ ID NO: 51004 - DNA, 20 bp, synthetic construct
  misc_feature 1..20: note = chemically synthesized
  source 1..20: mol_type = other DNA
cttgacaagaggcagcagca

SEQ ID NO: 51005 - DNA, 20 bp, synthetic construct
  misc_feature 1..20: note = chemically synthesized
  source 1..20: mol_type = other DNA
aggaggagggggagaagaca

SEQ ID NO: 51006 - DNA, 20 bp, synthetic construct
  misc_feature 1..20: note = chemically synthesized
  source 1..20: mol_type = other DNA
tagaagcccaagcaaaggcc

SEQ ID NO: 51007 - DNA, 20 bp, synthetic construct
  misc_feature 1..20: note = chemically synthesized
  source 1..20: mol_type = other DNA
ccaggcttccagcctgagcg

SEQ ID NO: 51008 - DNA, 20 bp, synthetic construct
  misc_feature 1..20: note = chemically synthesized
  source 1..20: mol_type = other DNA
gcaggctgcgcggtggccgc

SEQ ID NO: 51009 - DNA, 20 bp, synthetic construct
  misc_feature 1..20: note = chemically synthesized
  source 1..20: mol_type = other DNA
cccacggcgagcctcatctt

SEQ ID NO: 51010 - DNA, 20 bp, synthetic construct
  misc_feature 1..20: note = chemically synthesized
  source 1..20: mol_type = other DNA
gacctcccgtgtttgtgcag

SEQ ID NO: 51011 - DNA, 20 bp, synthetic construct
  misc_feature 1..20: note = chemically synthesized
  source 1..20: mol_type = other DNA
ctgagctctggagacgaccc

SEQ ID NO: 51012 - DNA, 20 bp, synthetic construct
  misc_feature 1..20: note = chemically synthesized
  source 1..20: mol_type = other DNA
ggagacgacccgcgagtgga

SEQ ID NO: 51013 - DNA, 20 bp, synthetic construct
  misc_feature 1..20: note = chemically synthesized
  source 1..20: mol_type = other DNA
tcgcgggtcgtctccagagc

SEQ ID NO: 51014 - DNA, 20 bp, synthetic construct
  misc_feature 1..20: note = chemically synthesized
  source 1..20: mol_type = other DNA
tggccaagaaggggtgtaac

SEQ ID NO: 51015 - DNA, 20 bp, synthetic construct
  misc_feature 1..20: note = chemically synthesized
  source 1..20: mol_type = other DNA
aaccttctattggctcagac

SEQ ID NO: 51016 - DNA, 20 bp, synthetic construct
  misc_feature 1..20: note = chemically synthesized
  source 1..20: mol_type = other DNA
ggtcccagtgttgcttgtgt

SEQ ID NO: 51017 - DNA, 20 bp, synthetic construct
  misc_feature 1..20: note = chemically synthesized
  source 1..20: mol_type = other DNA
agggagagacagcatcgccc

SEQ ID NO: 51018 - DNA, 20 bp, synthetic construct
  misc_feature 1..20: note = chemically synthesized
  source 1..20: mol_type = other DNA
gagaagagggagtgagactc

SEQ ID NO: 51019 - DNA, 20 bp, synthetic construct
  misc_feature 1..20: note = chemically synthesized
  source 1..20: mol_type = other DNA
tgtcgttggccaagccaggc

SEQ ID NO: 51020 - DNA, 20 bp, synthetic construct
  misc_feature 1..20: note = chemically synthesized
  source 1..20: mol_type = other DNA
ctgctactcagggcacaaaa

SEQ ID NO: 51021 - DNA, 20 bp, synthetic construct
  misc_feature 1..20: note = chemically synthesized
  source 1..20: mol_type = other DNA
agttgagggtaaattaacga

SEQ ID NO: 51022 - DNA, 20 bp, synthetic construct
  misc_feature 1..20: note = chemically synthesized
  source 1..20: mol_type = other DNA
gcctccagagttcccatagg

SEQ ID NO: 51023 - DNA, 20 bp, synthetic construct
  misc_feature 1..20: note = chemically synthesized
  source 1..20: mol_type = other DNA
ggaattgctagcttatgggg

SEQ ID NO: 51024 - DNA, 20 bp, synthetic construct
  misc_feature 1..20: note = chemically synthesized
  source 1..20: mol_type = other DNA
gcgagtggaaggagtccagc

SEQ ID NO: 51025 - DNA, 20 bp, synthetic construct
  misc_feature 1..20: note = chemically synthesized
  source 1..20: mol_type = other DNA
agcacgtctaaccaggttat

SEQ ID NO: 51026 - DNA, 20 bp, synthetic construct
  misc_feature 1..20: note = chemically synthesized
  source 1..20: mol_type = other DNA
gccaatgtgttggggtagct

SEQ ID NO: 51027 - DNA, 20 bp, synthetic construct
  misc_feature 1..20: note = chemically synthesized
  source 1..20: mol_type = other DNA
ctgtgtctggctgtccctga

SEQ ID NO: 51028 - DNA, 20 bp, synthetic construct
  misc_feature 1..20: note = chemically synthesized
  source 1..20: mol_type = other DNA
ggcttgctacctcaactatg

SEQ ID NO: 51029 - DNA, 20 bp, synthetic construct
  misc_feature 1..20: note = chemically synthesized
  source 1..20: mol_type = other DNA
ctactcagggcacaaaagaa

SEQ ID NO: 51030 - DNA, 20 bp, synthetic construct
  misc_feature 1..20: note = chemically synthesized
  source 1..20: mol_type = other DNA
ctctctgtttaggaagaact

SEQ ID NO: 51031 - DNA, 20 bp, synthetic construct
  misc_feature 1..20: note = chemically synthesized
  source 1..20: mol_type = other DNA
attgctagcttatggggaga

SEQ ID NO: 51032 - DNA, 20 bp, synthetic construct
  misc_feature 1..20: note = chemically synthesized
  source 1..20: mol_type = other DNA
ccgcgatgacaatggctgca

SEQ ID NO: 51033 - DNA, 20 bp, synthetic construct
  misc_feature 1..20: note = chemically synthesized
  source 1..20: mol_type = other DNA
aggaaggggggttgggagag

SEQ ID NO: 51034 - DNA, 20 bp, synthetic construct
  misc_feature 1..20: note = chemically synthesized
  source 1..20: mol_type = other DNA
gctgcacaaacacgggaggt

SEQ ID NO: 51035 - DNA, 20 bp, synthetic construct
  misc_feature 1..20: note = chemically synthesized
  source 1..20: mol_type = other DNA
ctctacgccccacccctggc

SEQ ID NO: 51036 - DNA, 20 bp, synthetic construct
  misc_feature 1..20: note = chemically synthesized
  source 1..20: mol_type = other DNA
gccccacccctggcctttgc

SEQ ID NO: 51037 - DNA, 20 bp, synthetic construct
  misc_feature 1..20: note = chemically synthesized
  source 1..20: mol_type = other DNA
gccatcgagcggtcagagca

SEQ ID NO: 51038 - DNA, 20 bp, synthetic construct
  misc_feature 1..20: note = chemically synthesized
  source 1..20: mol_type = other DNA
tggggcatttgtcacactgt

SEQ ID NO: 51039 - DNA, 20 bp, synthetic construct
  misc_feature 1..20: note = chemically synthesized
  source 1..20: mol_type = other DNA
ttgtcacactgttggggctt

SEQ ID NO: 51040 - DNA, 20 bp, synthetic construct
  misc_feature 1..20: note = chemically synthesized
  source 1..20: mol_type = other DNA
acactgttggggcttccacg

SEQ ID NO: 51041 - DNA, 20 bp, synthetic construct
  misc_feature 1..20: note = chemically synthesized
  source 1..20: mol_type = other DNA
gcctatgggaactctggagg

SEQ ID NO: 51042 - DNA, 20 bp, synthetic construct
  misc_feature 1..20: note = chemically synthesized
  source 1..20: mol_type = other DNA
ggctttgtggaggggctgcc

SEQ ID NO: 51043 - DNA, 20 bp, synthetic construct
  misc_feature 1..20: note = chemically synthesized
  source 1..20: mol_type = other DNA
ccacaggcttatgttgcctc

SEQ ID NO: 51044 - DNA, 20 bp, synthetic construct
  misc_feature 1..20: note = chemically synthesized
  source 1..20: mol_type = other DNA
gagctgtgggcctcctctcc

SEQ ID NO: 51045 - DNA, 20 bp, synthetic construct
  misc_feature 1..20: note = chemically synthesized
  source 1..20: mol_type = other DNA
ggatgctgtctctgcaacca

SEQ ID NO: 51046 - DNA, 20 bp, synthetic construct
  misc_feature 1..20: note = chemically synthesized
  source 1..20: mol_type = other DNA
gattttaatagttacccatg

SEQ ID NO: 51047 - DNA, 20 bp, synthetic construct
  misc_feature 1..20: note = chemically synthesized
  source 1..20: mol_type = other DNA
aatagttacccatggctggc

SEQ ID NO: 51048 - DNA, 20 bp, synthetic construct
  misc_feature 1..20: note = chemically synthesized
  source 1..20: mol_type = other DNA
aggggagactgttgaatttg

SEQ ID NO: 51049 - DNA, 20 bp, synthetic construct
  misc_feature 1..20: note = chemically synthesized
  source 1..20: mol_type = other DNA
ccaagaaggggtgtaactca

SEQ ID NO: 51050 - DNA, 20 bp, synthetic construct
  misc_feature 1..20: note = chemically synthesized
  source 1..20: mol_type = other DNA
gcagacccagagtctggaga

SEQ ID NO: 51051 - DNA, 20 bp, synthetic construct
  misc_feature 1..20: note = chemically synthesized
  source 1..20: mol_type = other DNA
ctggagacccagattctagg

SEQ ID NO: 51052 - DNA, 20 bp, synthetic construct
  misc_feature 1..20: note = chemically synthesized
  source 1..20: mol_type = other DNA
aagatggcaattcctccccc

SEQ ID NO: 51053 - DNA, 20 bp, synthetic construct
  misc_feature 1..20: note = chemically synthesized
  source 1..20: mol_type = other DNA
tgaaaacgccctgtgcatac

SEQ ID NO: 51054 - DNA, 20 bp, synthetic construct
  misc_feature 1..20: note = chemically synthesized
  source 1..20: mol_type = other DNA
agacaaggcggatacagagg

SEQ ID NO: 51055 - DNA, 20 bp, synthetic construct
  misc_feature 1..20: note = chemically synthesized
  source 1..20: mol_type = other DNA
agcatgaggccactaagtgc

SEQ ID NO: 51056 - DNA, 20 bp, synthetic construct
  misc_feature 1..20: note = chemically synthesized
  source 1..20: mol_type = other DNA
attccatccgatggtcccag

SEQ ID NO: 51057 - DNA, 20 bp, synthetic construct
  misc_feature 1..20: note = chemically synthesized
  source 1..20: mol_type = other DNA
tgtgtgaagaaagcctccta

SEQ ID NO: 51058 - DNA, 20 bp, synthetic construct
  misc_feature 1..20: note = chemically synthesized
  source 1..20: mol_type = other DNA
gccctgatgcaatcaaggta

SEQ ID NO: 51059 - DNA, 20 bp, synthetic construct
  misc_feature 1..20: note = chemically synthesized
  source 1..20: mol_type = other DNA
actgggaccatcggatggaa

SEQ ID NO: 51060 - DNA, 20 bp, synthetic construct
  misc_feature 1..20: note = chemically synthesized
  source 1..20: mol_type = other DNA
tccgacactgcacaccatct

SEQ ID NO: 51061 - DNA, 20 bp, synthetic construct
  misc_feature 1..20: note = chemically synthesized
  source 1..20: mol_type = other DNA
gaaggttgccctaatggcct

SEQ ID NO: 51062 - DNA, 20 bp, synthetic construct
  misc_feature 1..20: note = chemically synthesized
  source 1..20: mol_type = other DNA
cataagcctcagtatgcaca

SEQ ID NO: 51063 - DNA, 20 bp, synthetic construct
  misc_feature 1..20: note = chemically synthesized
  source 1..20: mol_type = other DNA
gttttcagctaccccaacac

SEQ ID NO: 51064 - DNA, 20 bp, synthetic construct
  misc_feature 1..20: note = chemically synthesized
  source 1..20: mol_type = other DNA
ttttttttaacccaaggtca

SEQ ID NO: 51065 - DNA, 20 bp, synthetic construct
  misc_feature 1..20: note = chemically synthesized
  source 1..20: mol_type = other DNA
tgtaactcttgtctgttgct

SEQ ID NO: 51066 - DNA, 20 bp, synthetic construct
  misc_feature 1..20: note = chemically synthesized
  source 1..20: mol_type = other DNA
agagacagcatccctatcac

SEQ ID NO: 51067 - DNA, 20 bp, synthetic construct
  misc_feature 1..20: note = chemically synthesized
  source 1..20: mol_type = other DNA
gggtcctctctcaaggaatt

SEQ ID NO: 51068 - DNA, 20 bp, synthetic construct
  misc_feature 1..20: note = chemically synthesized
  source 1..20: mol_type = other DNA
caggacttggatccaagaag

SEQ ID NO: 51069 - DNA, 20 bp, synthetic construct
  misc_feature 1..20: note = chemically synthesized
  source 1..20: mol_type = other DNA
atgctctgaccgctcgatgg

SEQ ID NO: 51070 - DNA, 20 bp, synthetic construct
  misc_feature 1..20: note = chemically synthesized
  source 1..20: mol_type = other DNA
cttgacaagaggcagcagca

SEQ ID NO: 51071 - DNA, 20 bp, synthetic construct
  misc_feature 1..20: note = chemically synthesized
  source 1..20: mol_type = other DNA
tgataacctggttagacgtg

SEQ ID NO: 51072 - DNA, 20 bp, synthetic construct
  misc_feature 1..20: note = chemically synthesized
  source 1..20: mol_type = other DNA
atttattgtatttcactgct

SEQ ID NO: 51073 - DNA, 20 bp, synthetic construct
  misc_feature 1..20: note = chemically synthesized
  source 1..20: mol_type = other DNA
atggaaaggcacccagacac

SEQ ID NO: 51074 - DNA, 20 bp, synthetic construct
  misc_feature 1..20: note = chemically synthesized
  source 1..20: mol_type = other DNA
tgagcagcgagcacagtcgg

SEQ ID NO: 51075 - DNA, 20 bp, synthetic construct
  misc_feature 1..20: note = chemically synthesized
  source 1..20: mol_type = other DNA
tgggcgcaatctttgacctc

SEQ ID NO: 51076 - DNA, 22 bp, synthetic construct
  misc_feature 1..22: note = chemically synthesized
  source 1..22: mol_type = other DNA
cattgtgcttcatgtcccttcc

SEQ ID NO: 51077 - DNA, 22 bp, synthetic construct
  misc_feature 1..22: note = chemically synthesized
  source 1..22: mol_type = other DNA
tgcttcatgtcccttcccatca

SEQ ID NO: 51078 - DNA, 22 bp, synthetic construct
  misc_feature 1..22: note = chemically synthesized
  source 1..22: mol_type = other DNA
catgtcccttcccatcaacatt

SEQ ID NO: 51079 - DNA, 22 bp, synthetic construct
  misc_feature 1..22: note = chemically synthesized
  source 1..22: mol_type = other DNA
atgtcccttcccatcaacattt

SEQ ID NO: 51080 - DNA, 22 bp, synthetic construct
  misc_feature 1..22: note = chemically synthesized
  source 1..22: mol_type = other DNA
cccatcaacatttctgtgctgg

SEQ ID NO: 51081 - DNA, 22 bp, synthetic construct
  misc_feature 1..22: note = chemically synthesized
  source 1..22: mol_type = other DNA
ccatcaacatttctgtgctgga

SEQ ID NO: 51082 - DNA, 22 bp, synthetic construct
  misc_feature 1..22: note = chemically synthesized
  source 1..22: mol_type = other DNA
ctgtgctggactccttccactc

SEQ ID NO: 51083 - DNA, 22 bp, synthetic construct
  misc_feature 1..22: note = chemically synthesized
  source 1..22: mol_type = other DNA
tgtgctggactccttccactcg

SEQ ID NO: 51084 - DNA, 22 bp, synthetic construct
  misc_feature 1..22: note = chemically synthesized
  source 1..22: mol_type = other DNA
tgctggactccttccactcgcg

SEQ ID NO: 51085 - DNA, 22 bp, synthetic construct
  misc_feature 1..22: note = chemically synthesized
  source 1..22: mol_type = other DNA
gactccttccactcgcgggtcg

SEQ ID NO: 51086 - DNA, 22 bp, synthetic construct
  misc_feature 1..22: note = chemically synthesized
  source 1..22: mol_type = other DNA
cttccactcgcgggtcgtctcc

SEQ ID NO: 51087 - DNA, 22 bp, synthetic construct
  misc_feature 1..22: note = chemically synthesized
  source 1..22: mol_type = other DNA
ccactcgcgggtcgtctccaga

SEQ ID NO: 51088 - DNA, 22 bp, synthetic construct
  misc_feature 1..22: note = chemically synthesized
  source 1..22: mol_type = other DNA
cactcgcgggtcgtctccagag

SEQ ID NO: 51089 - DNA, 22 bp, synthetic construct
  misc_feature 1..22: note = chemically synthesized
  source 1..22: mol_type = other DNA
gcgggtcgtctccagagctcag

SEQ ID NO: 51090 - DNA, 22 bp, synthetic construct
  misc_feature 1..22: note = chemically synthesized
  source 1..22: mol_type = other DNA
cagagctcagaaaatgaggtga

SEQ ID NO: 51091 - DNA, 22 bp, synthetic construct
  misc_feature 1..22: note = chemically synthesized
  source 1..22: mol_type = other DNA
agaaaatgaggtgatcagtggg

SEQ ID NO: 51092 - DNA, 22 bp, synthetic construct
  misc_feature 1..22: note = chemically synthesized
  source 1..22: mol_type = other DNA
ggagaggggcgattgggcaacc

SEQ ID NO: 51093 - DNA, 22 bp, synthetic construct
  misc_feature 1..22: note = chemically synthesized
  source 1..22: mol_type = other DNA
ggcaacccggctgcacaaacac

SEQ ID NO: 51094 - DNA, 22 bp, synthetic construct
  misc_feature 1..22: note = chemically synthesized
  source 1..22: mol_type = other DNA
cacaaacacgggaggtcaaaga

SEQ ID NO: 51095 - DNA, 22 bp, synthetic construct
  misc_feature 1..22: note = chemically synthesized
  source 1..22: mol_type = other DNA
cgcccagcccgcccaggccggg

SEQ ID NO: 51096 - DNA, 22 bp, synthetic construct
  misc_feature 1..22: note = chemically synthesized
  source 1..22: mol_type = other DNA
cacagaagcgagtccgactgtg

SEQ ID NO: 51097 - DNA, 22 bp, synthetic construct
  misc_feature 1..22: note = chemically synthesized
  source 1..22: mol_type = other DNA
tgctcgctgctcagcgccgcac

SEQ ID NO: 51098 - DNA, 22 bp, synthetic construct
  misc_feature 1..22: note = chemically synthesized
  source 1..22: mol_type = other DNA
gctgctcagcgccgcacccgga

SEQ ID NO: 51099 - DNA, 22 bp, synthetic construct
  misc_feature 1..22: note = chemically synthesized
  source 1..22: mol_type = other DNA
ctcagcgccgcacccggaagat

SEQ ID NO: 51100 - DNA, 22 bp, synthetic construct
  misc_feature 1..22: note = chemically synthesized
  source 1..22: mol_type = other DNA
agcgccgcacccggaagatgag

SEQ ID NO: 51101 - DNA, 22 bp, synthetic construct
  misc_feature 1..22: note = chemically synthesized
  source 1..22: mol_type = other DNA
gccgtgggagccctgctggtct

SEQ ID NO: 51102 - DNA, 22 bp, synthetic construct
  misc_feature 1..22: note = chemically synthesized
  source 1..22: mol_type = other DNA
ctggtctgcgccgtcctgggtg

SEQ ID NO: 51103 - DNA, 22 bp, synthetic construct
  misc_feature 1..22: note = chemically synthesized
  source 1..22: mol_type = other DNA
gtctgcgccgtcctgggtgagt

SEQ ID NO: 51104 - DNA, 22 bp, synthetic construct
  misc_feature 1..22: note = chemically synthesized
  source 1..22: mol_type = other DNA
cgccgtcctgggtgagtgcggg

SEQ ID NO: 51105 - DNA, 22 bp, synthetic construct
  misc_feature 1..22: note = chemically synthesized
  source 1..22: mol_type = other DNA
ggtgagtgcgggcacggggtag

SEQ ID NO: 51106 - DNA, 22 bp, synthetic construct
  misc_feature 1..22: note = chemically synthesized
  source 1..22: mol_type = other DNA
gcccgcgcgttccctgcaaccc

SEQ ID NO: 51107 - DNA, 22 bp, synthetic construct
  misc_feature 1..22: note = chemically synthesized
  source 1..22: mol_type = other DNA
cctgcaacccgggcggccaccg

SEQ ID NO: 51108 - DNA, 22 bp, synthetic construct
  misc_feature 1..22: note = chemically synthesized
  source 1..22: mol_type = other DNA
caacccgggcggccaccgcgca

SEQ ID NO: 51109 - DNA, 22 bp, synthetic construct
  misc_feature 1..22: note = chemically synthesized
  source 1..22: mol_type = other DNA
catgcactccgcgctcaggctg

SEQ ID NO: 51110 - DNA, 22 bp, synthetic construct
  misc_feature 1..22: note = chemically synthesized
  source 1..22: mol_type = other DNA
cgcgctcaggctggaagcctgg

SEQ ID NO: 51111 - DNA, 22 bp, synthetic construct
  misc_feature 1..22: note = chemically synthesized
  source 1..22: mol_type = other DNA
aggctggaagcctgggtgtctg

SEQ ID NO: 51112 - DNA, 22 bp, synthetic construct
  misc_feature 1..22: note = chemically synthesized
  source 1..22: mol_type = other DNA
gaagcctgggtgtctgggtgcc

SEQ ID NO: 51113 - DNA, 22 bp, synthetic construct
  misc_feature 1..22: note = chemically synthesized
  source 1..22: mol_type = other DNA
ggtgtctgggtgcctttccatt

SEQ ID NO: 51114 - DNA, 22 bp, synthetic construct
  misc_feature 1..22: note = chemically synthesized
  source 1..22: mol_type = other DNA
ggtgcctttccattgcctctct

SEQ ID NO: 51115 - DNA, 22 bp, synthetic construct
  misc_feature 1..22: note = chemically synthesized
  source 1..22: mol_type = other DNA
tccattgcctctctacgcccca

SEQ ID NO: 51116 - DNA, 22 bp, synthetic construct
  misc_feature 1..22: note = chemically synthesized
  source 1..22: mol_type = other DNA
ccattgcctctctacgccccac

SEQ ID NO: 51117 - DNA, 22 bp, synthetic construct
  misc_feature 1..22: note = chemically synthesized
  source 1..22: mol_type = other DNA
cattgcctctctacgccccacc

SEQ ID NO: 51118 - DNA, 22 bp, synthetic construct
  misc_feature 1..22: note = chemically synthesized
  source 1..22: mol_type = other DNA
cctctctacgccccacccctgg

SEQ ID NO: 51119 - DNA, 22 bp, synthetic construct
  misc_feature 1..22: note = chemically synthesized
  source 1..22: mol_type = other DNA
tctacgccccacccctggcctt

SEQ ID NO: 51120 - DNA, 22 bp, synthetic construct
  misc_feature 1..22: note = chemically synthesized
  source 1..22: mol_type = other DNA
tacgccccacccctggcctttg

SEQ ID NO: 51121 - DNA, 22 bp, synthetic construct
  misc_feature 1..22: note = chemically synthesized
  source 1..22: mol_type = other DNA
cgccccacccctggcctttgct

SEQ ID NO: 51122 - DNA, 22 bp, synthetic construct
  misc_feature 1..22: note = chemically synthesized
  source 1..22: mol_type = other DNA
gcctttgcttgggcttctagac

SEQ ID NO: 51123 - DNA, 22 bp, synthetic construct
  misc_feature 1..22: note = chemically synthesized
  source 1..22: mol_type = other DNA
tgcttgggcttctagacacctt

SEQ ID NO: 51124 - DNA, 22 bp, synthetic construct
  misc_feature 1..22: note = chemically synthesized
  source 1..22: mol_type = other DNA
gcttgggcttctagacaccttt

SEQ ID NO: 51125 - DNA, 22 bp, synthetic construct
  misc_feature 1..22: note = chemically synthesized
  source 1..22: mol_type = other DNA
cttgggcttctagacacctttc

SEQ ID NO: 51126 - DNA, 22 bp, synthetic construct
  misc_feature 1..22: note = chemically synthesized
  source 1..22: mol_type = other DNA
gggcttctagacacctttcact

SEQ ID NO: 51127 - DNA, 22 bp, synthetic construct
  misc_feature 1..22: note = chemically synthesized
  source 1..22: mol_type = other DNA
ggcttctagacacctttcactg

SEQ ID NO: 51128 - DNA, 22 bp, synthetic construct
  misc_feature 1..22: note = chemically synthesized
  source 1..22: mol_type = other DNA
ctagacacctttcactgcactc

SEQ ID NO: 51129 - DNA, 22 bp, synthetic construct
  misc_feature 1..22: note = chemically synthesized
  source 1..22: mol_type = other DNA
tagacacctttcactgcactca

SEQ ID NO: 51130 - DNA, 22 bp, synthetic construct
  misc_feature 1..22: note = chemically synthesized
  source 1..22: mol_type = other DNA
gacacctttcactgcactcact

SEQ ID NO: 51131 - DNA, 22 bp, synthetic construct
  misc_feature 1..22: note = chemically synthesized
  source 1..22: mol_type = other DNA
tcactgcactcactgtcttctc

SEQ ID NO: 51132 - DNA, 22 bp, synthetic construct
  misc_feature 1..22: note = chemically synthesized
  source 1..22: mol_type = other DNA
cactgcactcactgtcttctcc

SEQ ID NO: 51133 - DNA, 22 bp, synthetic construct
  misc_feature 1..22: note = chemically synthesized
  source 1..22: mol_type = other DNA
actgcactcactgtcttctccc

SEQ ID NO: 51134 - DNA, 22 bp, synthetic construct
  misc_feature 1..22: note = chemically synthesized
  source 1..22: mol_type = other DNA
cactcactgtcttctccccctc

SEQ ID NO: 51135 - DNA, 22 bp, synthetic construct
  misc_feature 1..22: note = chemically synthesized
  source 1..22: mol_type = other DNA
actgtcttctccccctcctcct

SEQ ID NO: 51136 - DNA, 22 bp, synthetic construct
  misc_feature 1..22: note = chemically synthesized
  source 1..22: mol_type = other DNA
tcttctccccctcctcctcttt

SEQ ID NO: 51137 - DNA, 22 bp, synthetic construct
  misc_feature 1..22: note = chemically synthesized
  source 1..22: mol_type = other DNA
ctccccctcctcctctttgtcc

SEQ ID NO: 51138 - DNA, 22 bp, synthetic construct
  misc_feature 1..22: note = chemically synthesized
  source 1..22: mol_type = other DNA
tccccctcctcctctttgtcca

SEQ ID NO: 51139 - DNA, 22 bp, synthetic construct
  misc_feature 1..22: note = chemically synthesized
  source 1..22: mol_type = other DNA
cccctcctcctctttgtccagt

SEQ ID NO: 51140 - DNA, 22 bp, synthetic construct
  misc_feature 1..22: note = chemically synthesized
  source 1..22: mol_type = other DNA
ctcctctttgtccagtaaatct

SEQ ID NO: 51141 - DNA, 22 bp, synthetic construct
  misc_feature 1..22: note = chemically synthesized
  source 1..22: mol_type = other DNA
ctctttgtccagtaaatcttgc

SEQ ID NO: 51142 - DNA, 22 bp, synthetic construct
  misc_feature 1..22: note = chemically synthesized
  source 1..22: mol_type = other DNA
tttgtccagtaaatcttgcagc

SEQ ID NO: 51143 - DNA, 22 bp, synthetic construct
  misc_feature 1..22: note = chemically synthesized
  source 1..22: mol_type = other DNA
tgtccagtaaatcttgcagcag

SEQ ID NO: 51144 - DNA, 22 bp, synthetic construct
  misc_feature 1..22: note = chemically synthesized
  source 1..22: mol_type = other DNA
gtccagtaaatcttgcagcagt

SEQ ID NO: 51145 - DNA, 22 bp, synthetic construct
  misc_feature 1..22: note = chemically synthesized
  source 1..22: mol_type = other DNA
tccagtaaatcttgcagcagtg

SEQ ID NO: 51146 - DNA, 22 bp, synthetic construct
  misc_feature 1..22: note = chemically synthesized
  source 1..22: mol_type = other DNA
gcagcagtgaaatacaataaat

SEQ ID NO: 51147 - DNA, 22 bp, synthetic construct
  misc_feature 1..22: note = chemically synthesized
  source 1..22: mol_type = other DNA
cagcagtgaaatacaataaatc

SEQ ID NO: 51148 - DNA, 22 bp, synthetic construct
  misc_feature 1..22: note = chemically synthesized
  source 1..22: mol_type = other DNA
accaggttatcaaaaccctttg

SEQ ID NO: 51149 - DNA, 22 bp, synthetic construct
  misc_feature 1..22: note = chemically synthesized
  source 1..22: mol_type = other DNA
tcaaaaccctttgctgctgcct

SEQ ID NO: 51150 - DNA, 22 bp, synthetic construct
  misc_feature 1..22: note = chemically synthesized
  source 1..22: mol_type = other DNA
tgctgctgcctcttgtcaagtc

SEQ ID NO: 51151 - DNA, 22 bp, synthetic construct
  misc_feature 1..22: note = chemically synthesized
  source 1..22: mol_type = other DNA
gctgctgcctcttgtcaagtcc

SEQ ID NO: 51152 - DNA, 22 bp, synthetic construct
  misc_feature 1..22: note = chemically synthesized
  source 1..22: mol_type = other DNA
ctgctgcctcttgtcaagtccg

SEQ ID NO: 51153 - DNA, 22 bp, synthetic construct
  misc_feature 1..22: note = chemically synthesized
  source 1..22: mol_type = other DNA
ctgcctcttgtcaagtccgaac

SEQ ID NO: 51154 - DNA, 22 bp, synthetic construct
  misc_feature 1..22: note = chemically synthesized
  source 1..22: mol_type = other DNA
cctcttgtcaagtccgaactcc

SEQ ID NO: 51155 - DNA, 22 bp, synthetic construct
  misc_feature 1..22: note = chemically synthesized
  source 1..22: mol_type = other DNA
ttgtcaagtccgaactccttag

SEQ ID NO: 51156 - DNA, 22 bp, synthetic construct
  misc_feature 1..22: note = chemically synthesized
  source 1..22: mol_type = other DNA
gtcaagtccgaactccttagca

SEQ ID NO: 51157 - DNA, 22 bp, synthetic construct
  misc_feature 1..22: note = chemically synthesized
  source 1..22: mol_type = other DNA
tcaagtccgaactccttagcat

SEQ ID NO: 51158 - DNA, 22 bp, synthetic construct
  misc_feature 1..22: note = chemically synthesized
  source 1..22: mol_type = other DNA
cttagcatggcattcaaggcct

SEQ ID NO: 51159 - DNA, 22 bp, synthetic construct
  misc_feature 1..22: note = chemically synthesized
  source 1..22: mol_type = other DNA
agcatggcattcaaggcctccc

SEQ ID NO: 51160 - DNA, 22 bp, synthetic construct
  misc_feature 1..22: note = chemically synthesized
  source 1..22: mol_type = other DNA
gcatggcattcaaggcctcccg

SEQ ID NO: 51161 - DNA, 22 bp, synthetic construct
  misc_feature 1..22: note = chemically synthesized
  source 1..22: mol_type = other DNA
aaggcctcccgggtctgaccat

SEQ ID NO: 51162 - DNA, 22 bp, synthetic construct
  misc_feature 1..22: note = chemically synthesized
  source 1..22: mol_type = other DNA
ccgggtctgaccattccccttt

SEQ ID NO: 51163 - DNA, 22 bp, synthetic construct
  misc_feature 1..22: note = chemically synthesized
  source 1..22: mol_type = other DNA
accattcccctttcagaggctg

SEQ ID NO: 51164 - DNA, 22 bp, synthetic construct
  misc_feature 1..22: note = chemically synthesized
  source 1..22: mol_type = other DNA
ccctttcagaggctgatgtccc

SEQ ID NO: 51165 - DNA, 22 bp, synthetic construct
  misc_feature 1..22: note = chemically synthesized
  source 1..22: mol_type = other DNA
tcagaggctgatgtcccctggg

SEQ ID NO: 51166 - DNA, 22 bp, synthetic construct
  misc_feature 1..22: note = chemically synthesized
  source 1..22: mol_type = other DNA
cagaggctgatgtcccctgggt

SEQ ID NO: 51167 - DNA, 22 bp, synthetic construct
  misc_feature 1..22: note = chemically synthesized
  source 1..22: mol_type = other DNA
agaggctgatgtcccctgggtg

SEQ ID NO: 51168 - DNA, 22 bp, synthetic construct
  misc_feature 1..22: note = chemically synthesized
  source 1..22: mol_type = other DNA
atgtcccctgggtgccctggga

SEQ ID NO: 51169 - DNA, 22 bp, synthetic construct
  misc_feature 1..22: note = chemically synthesized
  source 1..22: mol_type = other DNA
ggtgccctgggagctgtagatg

SEQ ID NO: 51170 - DNA, 22 bp, synthetic construct
  misc_feature 1..22: note = chemically synthesized
  source 1..22: mol_type = other DNA
ggagctgtagatgtcctgccaa

SEQ ID NO: 51171 - DNA, 22 bp, synthetic construct
  misc_feature 1..22: note = chemically synthesized
  source 1..22: mol_type = other DNA
tagatgtcctgccaaggaagcg

SEQ ID NO: 51172 - DNA, 22 bp, synthetic construct
  misc_feature 1..22: note = chemically synthesized
  source 1..22: mol_type = other DNA
ccaaggaagcggtgccatcgag

SEQ ID NO: 51173 - DNA, 22 bp, synthetic construct
  misc_feature 1..22: note = chemically synthesized
  source 1..22: mol_type = other DNA
gaagccagacttcttggatcca

SEQ ID NO: 51174 - DNA, 22 bp, synthetic construct
  misc_feature 1..22: note = chemically synthesized
  source 1..22: mol_type = other DNA
aagccagacttcttggatccaa

SEQ ID NO: 51175 - DNA, 22 bp, synthetic construct
  misc_feature 1..22: note = chemically synthesized
  source 1..22: mol_type = other DNA
cttggatccaagtcctggccgg

SEQ ID NO: 51176 - DNA, 22 bp, synthetic construct
  misc_feature 1..22: note = chemically synthesized
  source 1..22: mol_type = other DNA
ttggatccaagtcctggccggc

SEQ ID NO: 51177 - DNA, 22 bp, synthetic construct
  misc_feature 1..22: note = chemically synthesized
  source 1..22: mol_type = other DNA
ggatccaagtcctggccggctc

SEQ ID NO: 51178 - DNA, 22 bp, synthetic construct
  misc_feature 1..22: note = chemically synthesized
  source 1..22: mol_type = other DNA
gatccaagtcctggccggctcc

SEQ ID NO: 51179 - DNA, 22 bp, synthetic construct
  misc_feature 1..22: note = chemically synthesized
  source 1..22: mol_type = other DNA
gccggctcctcaccagggaggg

SEQ ID NO: 51180 - DNA, 22 bp, synthetic construct
  misc_feature 1..22: note = chemically synthesized
  source 1..22: mol_type = other DNA
ctcaccagggagggggtcatca

SEQ ID NO: 51181 - DNA, 22 bp, synthetic construct
  misc_feature 1..22: note = chemically synthesized
  source 1..22: mol_type = other DNA
accagggagggggtcatcacag

SEQ ID NO: 51182 - DNA, 22 bp, synthetic construct
  misc_feature 1..22: note = chemically synthesized
  source 1..22: mol_type = other DNA
gcctgggagggtcaaatgaggg

SEQ ID NO: 51183 - DNA, 22 bp, synthetic construct
  misc_feature 1..22: note = chemically synthesized
  source 1..22: mol_type = other DNA
cctgggagggtcaaatgagggt

SEQ ID NO: 51184 - DNA, 22 bp, synthetic construct
  misc_feature 1..22: note = chemically synthesized
  source 1..22: mol_type = other DNA
ggagggtcaaatgagggtcagc

SEQ ID NO: 51185 - DNA, 22 bp, synthetic construct
  misc_feature 1..22: note = chemically synthesized
  source 1..22: mol_type = other DNA
agtaccagtggcagatgttgca

SEQ ID NO: 51186 - DNA, 22 bp, synthetic construct
  misc_feature 1..22: note = chemically synthesized
  source 1..22: mol_type = other DNA
cacacatcctgctatggggcag

SEQ ID NO: 51187 - DNA, 22 bp, synthetic construct
  misc_feature 1..22: note = chemically synthesized
  source 1..22: mol_type = other DNA
ctatggggcagtggctgacgcc

SEQ ID NO: 51188 - DNA, 22 bp, synthetic construct
  misc_feature 1..22: note = chemically synthesized
  source 1..22: mol_type = other DNA
tggggcagtggctgacgccaca

SEQ ID NO: 51189 - DNA, 22 bp, synthetic construct
  misc_feature 1..22: note = chemically synthesized
  source 1..22: mol_type = other DNA
acgccacactccccgacctcct

SEQ ID NO: 51190 - DNA, 22 bp, synthetic construct
  misc_feature 1..22: note = chemically synthesized
  source 1..22: mol_type = other DNA
cccgacctcctgaggtggggcc

SEQ ID NO: 51191 - DNA, 22 bp, synthetic construct
  misc_feature 1..22: note = chemically synthesized
  source 1..22: mol_type = other DNA
ctgaggtggggcccccttcata

SEQ ID NO: 51192 - DNA, 22 bp, synthetic construct
  misc_feature 1..22: note = chemically synthesized
  source 1..22: mol_type = other DNA
aggtggggcccccttcatactc

SEQ ID NO: 51193 - DNA, 22 bp, synthetic construct
  misc_feature 1..22: note = chemically synthesized
  source 1..22: mol_type = other DNA
catactctaacttctgcctgcc

SEQ ID NO: 51194 - DNA, 22 bp, synthetic construct
  misc_feature 1..22: note = chemically synthesized
  source 1..22: mol_type = other DNA
atactctaacttctgcctgcca

SEQ ID NO: 51195 - DNA, 22 bp, synthetic construct
  misc_feature 1..22: note = chemically synthesized
  source 1..22: mol_type = other DNA
taacttctgcctgccattcatg

SEQ ID NO: 51196 - DNA, 22 bp, synthetic construct
  misc_feature 1..22: note = chemically synthesized
  source 1..22: mol_type = other DNA
acttctgcctgccattcatggg

SEQ ID NO: 51197 - DNA, 22 bp, synthetic construct
  misc_feature 1..22: note = chemically synthesized
  source 1..22: mol_type = other DNA
ctgcctgccattcatggggcat

SEQ ID NO: 51198 - DNA, 22 bp, synthetic construct
  misc_feature 1..22: note = chemically synthesized
  source 1..22: mol_type = other DNA
tgcctgccattcatggggcatt

SEQ ID NO: 51199 - DNA, 22 bp, synthetic construct
  misc_feature 1..22: note = chemically synthesized
  source 1..22: mol_type = other DNA
cctgccattcatggggcatttg

SEQ ID NO: 51200 - DNA, 22 bp, synthetic construct
  misc_feature 1..22: note = chemically synthesized
  source 1..22: mol_type = other DNA
ccattcatggggcatttgtcac

SEQ ID NO: 51201 - DNA, 22 bp, synthetic construct
  misc_feature 1..22: note = chemically synthesized
  source 1..22: mol_type = other DNA
atggggcatttgtcacactgtt

SEQ ID NO: 51202 - DNA, 22 bp, synthetic construct
  misc_feature 1..22: note = chemically synthesized
  source 1..22: mol_type = other DNA
gtcacactgttggggcttccac

SEQ ID NO: 51203 - DNA, 22 bp, synthetic construct
  misc_feature 1..22: note = chemically synthesized
  source 1..22: mol_type = other DNA
tcacactgttggggcttccacg

SEQ ID NO: 51204 - DNA, 22 bp, synthetic construct
  misc_feature 1..22: note = chemically synthesized
  source 1..22: mol_type = other DNA
ttggggcttccacgtttagttt

SEQ ID NO: 51205 - DNA, 22 bp, synthetic construct
  misc_feature 1..22: note = chemically synthesized
  source 1..22: mol_type = other DNA
gggcttccacgtttagttttct

SEQ ID NO: 51206 - DNA, 22 bp, synthetic construct
  misc_feature 1..22: note = chemically synthesized
  source 1..22: mol_type = other DNA
ccacgtttagttttctctcccc

SEQ ID NO: 51207 - DNA, 22 bp, synthetic construct
  misc_feature 1..22: note = chemically synthesized
  source 1..22: mol_type = other DNA
cacgtttagttttctctcccca

SEQ ID NO: 51208 - DNA, 22 bp, synthetic construct
  misc_feature 1..22: note = chemically synthesized
  source 1..22: mol_type = other DNA
agttttctctccccataagcta

SEQ ID NO: 51209 - DNA, 22 bp, synthetic construct
  misc_feature 1..22: note = chemically synthesized
  source 1..22: mol_type = other DNA
gttttctctccccataagctag

SEQ ID NO: 51210 - DNA, 22 bp, synthetic construct
  misc_feature 1..22: note = chemically synthesized
  source 1..22: mol_type = other DNA
tctctccccataagctagcaat

SEQ ID NO: 51211 - DNA, 22 bp, synthetic construct
  misc_feature 1..22: note = chemically synthesized
  source 1..22: mol_type = other DNA
ctctccccataagctagcaatt

SEQ ID NO: 51212 - DNA, 22 bp, synthetic construct
  misc_feature 1..22: note = chemically synthesized
  source 1..22: mol_type = other DNA
tctccccataagctagcaattc

SEQ ID NO: 51213 - DNA, 22 bp, synthetic construct
  misc_feature 1..22: note = chemically synthesized
  source 1..22: mol_type = other DNA
tccccataagctagcaattcct

SEQ ID NO: 51214 - DNA, 22 bp, synthetic construct
  misc_feature 1..22: note = chemically synthesized
  source 1..22: mol_type = other DNA
cccataagctagcaattccttg

SEQ ID NO: 51215 - DNA, 22 bp, synthetic construct
  misc_feature 1..22: note = chemically synthesized
  source 1..22: mol_type = other DNA
gcaattccttgagagaggaccc

SEQ ID NO: 51216 - DNA, 22 bp, synthetic construct
  misc_feature 1..22: note = chemically synthesized
  source 1..22: mol_type = other DNA
cttgagagaggaccccacgtta

SEQ ID NO: 51217 - DNA, 22 bp, synthetic construct
  misc_feature 1..22: note = chemically synthesized
  source 1..22: mol_type = other DNA
gagagaggaccccacgttactt

SEQ ID NO: 51218 - DNA, 22 bp, synthetic construct
  misc_feature 1..22: note = chemically synthesized
  source 1..22: mol_type = other DNA
agagaggaccccacgttacttg

SEQ ID NO: 51219 - DNA, 22 bp, synthetic construct
  misc_feature 1..22: note = chemically synthesized
  source 1..22: mol_type = other DNA
cttgcctttatccccgcacaga

SEQ ID NO: 51220 - DNA, 22 bp, synthetic construct
  misc_feature 1..22: note = chemically synthesized
  source 1..22: mol_type = other DNA
gcctttatccccgcacagagca

SEQ ID NO: 51221 - DNA, 22 bp, synthetic construct
  misc_feature 1..22: note = chemically synthesized
  source 1..22: mol_type = other DNA
cctttatccccgcacagagcac

SEQ ID NO: 51222 - DNA, 22 bp, synthetic construct
  misc_feature 1..22: note = chemically synthesized
  source 1..22: mol_type = other DNA
tatccccgcacagagcacttca

SEQ ID NO: 51223 - DNA, 22 bp, synthetic construct
  misc_feature 1..22: note = chemically synthesized
  source 1..22: mol_type = other DNA
atccccgcacagagcacttcac

SEQ ID NO: 51224 - DNA, 22 bp, synthetic construct
  misc_feature 1..22: note = chemically synthesized
  source 1..22: mol_type = other DNA
tccccgcacagagcacttcaca

SEQ ID NO: 51225 - DNA, 22 bp, synthetic construct
  misc_feature 1..22: note = chemically synthesized
  source 1..22: mol_type = other DNA
cacaggctgtgcaaggtaatgc

SEQ ID NO: 51226 - DNA, 22 bp, synthetic construct
  misc_feature 1..22: note = chemically synthesized
  source 1..22: mol_type = other DNA
acaggctgtgcaaggtaatgct

SEQ ID NO: 51227 - DNA, 22 bp, synthetic construct
  misc_feature 1..22: note = chemically synthesized
  source 1..22: mol_type = other DNA
tgcaaggtaatgctccactgag

SEQ ID NO: 51228 - DNA, 22 bp, synthetic construct
  misc_feature 1..22: note = chemically synthesized
  source 1..22: mol_type = other DNA
cactgaggacacattctcgcct

SEQ ID NO: 51229 - DNA, 22 bp, synthetic construct
  misc_feature 1..22: note = chemically synthesized
  source 1..22: mol_type = other DNA
aggacacattctcgcctatggg

SEQ ID NO: 51230 - DNA, 22 bp, synthetic construct
  misc_feature 1..22: note = chemically synthesized
  source 1..22: mol_type = other DNA
tcgcctatgggaactctggagg

SEQ ID NO: 51231 - DNA, 22 bp, synthetic construct
  misc_feature 1..22: note = chemically synthesized
  source 1..22: mol_type = other DNA
gcctatgggaactctggaggca

SEQ ID NO: 51232 - DNA, 22 bp, synthetic construct
  misc_feature 1..22: note = chemically synthesized
  source 1..22: mol_type = other DNA
tgggaactctggaggcagggct

SEQ ID NO: 51233 - DNA, 22 bp, synthetic construct
  misc_feature 1..22: note = chemically synthesized
  source 1..22: mol_type = other DNA
tggaggcagggctttgtggagg

SEQ ID NO: 51234 - DNA, 22 bp, synthetic construct
  misc_feature 1..22: note = chemically synthesized
  source 1..22: mol_type = other DNA
gaggcagggctttgtggagggg

SEQ ID NO: 51235 - DNA, 22 bp, synthetic construct
  misc_feature 1..22: note = chemically synthesized
  source 1..22: mol_type = other DNA
tgtggaggggctgccacaggct

SEQ ID NO: 51236 - DNA, 22 bp, synthetic construct
  misc_feature 1..22: note = chemically synthesized
  source 1..22: mol_type = other DNA
gtggaggggctgccacaggctt

SEQ ID NO: 51237 - DNA, 22 bp, synthetic construct
  misc_feature 1..22: note = chemically synthesized
  source 1..22: mol_type = other DNA
tggaggggctgccacaggctta

SEQ ID NO: 51238 - DNA, 22 bp, synthetic construct
  misc_feature 1..22: note = chemically synthesized
  source 1..22: mol_type = other DNA
ccacaggcttatgttgcctcct

SEQ ID NO: 51239 - DNA, 22 bp, synthetic construct
  misc_feature 1..22: note = chemically synthesized
  source 1..22: mol_type = other DNA
atgttgcctcctaggatttccc

SEQ ID NO: 51240 - DNA, 22 bp, synthetic construct
  misc_feature 1..22: note = chemically synthesized
  source 1..22: mol_type = other DNA
tgttgcctcctaggatttccca

SEQ ID NO: 51241 - DNA, 22 bp, synthetic construct
  misc_feature 1..22: note = chemically synthesized
  source 1..22: mol_type = other DNA
cctcctaggatttcccatgggc

SEQ ID NO: 51242 - DNA, 22 bp, synthetic construct
  misc_feature 1..22: note = chemically synthesized
  source 1..22: mol_type = other DNA
ctaggatttcccatgggccaag

SEQ ID NO: 51243 - DNA, 22 bp, synthetic construct
  misc_feature 1..22: note = chemically synthesized
  source 1..22: mol_type = other DNA
ggatttcccatgggccaagagg

SEQ ID NO: 51244 - DNA, 22 bp, synthetic construct
  misc_feature 1..22: note = chemically synthesized
  source 1..22: mol_type = other DNA
cccatgggccaagagggaaaat

SEQ ID NO: 51245 - DNA, 22 bp, synthetic construct
  misc_feature 1..22: note = chemically synthesized
  source 1..22: mol_type = other DNA
ccatgggccaagagggaaaatg

SEQ ID NO: 51246 - DNA, 22 bp, synthetic construct
  misc_feature 1..22: note = chemically synthesized
  source 1..22: mol_type = other DNA
gggtggccatccctggtggccc

SEQ ID NO: 51247 - DNA, 22 bp, synthetic construct
  misc_feature 1..22: note = chemically synthesized
  source 1..22: mol_type = other DNA
gtggcccctcctcatgcatcct

SEQ ID NO: 51248 - DNA, 22 bp, synthetic construct
  misc_feature 1..22: note = chemically synthesized
  source 1..22: mol_type = other DNA
ctcatgcatcctggagagctgt

SEQ ID NO: 51249 - DNA, 22 bp, synthetic construct
  misc_feature 1..22: note = chemically synthesized
  source 1..22: mol_type = other DNA
atgcatcctggagagctgtggg

SEQ ID NO: 51250 - DNA, 22 bp, synthetic construct
  misc_feature 1..22: note = chemically synthesized
  source 1..22: mol_type = other DNA
gagagctgtgggcctcctctcc

SEQ ID NO: 51251 - DNA, 22 bp, synthetic construct
  misc_feature 1..22: note = chemically synthesized
  source 1..22: mol_type = other DNA
tgggcctcctctccacaggctt

SEQ ID NO: 51252 - DNA, 22 bp, synthetic construct
  misc_feature 1..22: note = chemically synthesized
  source 1..22: mol_type = other DNA
ctctccacaggctttgtggatc

SEQ ID NO: 51253 - DNA, 22 bp, synthetic construct
  misc_feature 1..22: note = chemically synthesized
  source 1..22: mol_type = other DNA
tccacaggctttgtggatcttc

SEQ ID NO: 51254 - DNA, 22 bp, synthetic construct
  misc_feature 1..22: note = chemically synthesized
  source 1..22: mol_type = other DNA
cacaggctttgtggatcttctt

SEQ ID NO: 51255 - DNA, 22 bp, synthetic construct
  misc_feature 1..22: note = chemically synthesized
  source 1..22: mol_type = other DNA
tgtggatcttcttcagagccag

SEQ ID NO: 51256 - DNA, 22 bp, synthetic construct
  misc_feature 1..22: note = chemically synthesized
  source 1..22: mol_type = other DNA
gtggatcttcttcagagccagt

SEQ ID NO: 51257 - DNA, 22 bp, synthetic construct
  misc_feature 1..22: note = chemically synthesized
  source 1..22: mol_type = other DNA
tggatcttcttcagagccagtg

SEQ ID NO: 51258 - DNA, 22 bp, synthetic construct
  misc_feature 1..22: note = chemically synthesized
  source 1..22: mol_type = other DNA
cttcagagccagtgagtcagcc

SEQ ID NO: 51259 - DNA, 22 bp, synthetic construct
  misc_feature 1..22: note = chemically synthesized
  source 1..22: mol_type = other DNA
ttcagagccagtgagtcagcct

SEQ ID NO: 51260 - DNA, 22 bp, synthetic construct
  misc_feature 1..22: note = chemically synthesized
  source 1..22: mol_type = other DNA
cagagccagtgagtcagccttg

SEQ ID NO: 51261 - DNA, 22 bp, synthetic construct
  misc_feature 1..22: note = chemically synthesized
  source 1..22: mol_type = other DNA
agagccagtgagtcagccttgc

SEQ ID NO: 51262 - DNA, 22 bp, synthetic construct
  misc_feature 1..22: note = chemically synthesized
  source 1..22: mol_type = other DNA
gctgtggtggcccacaaggagt

SEQ ID NO: 51263 - DNA, 22 bp, synthetic construct
  misc_feature 1..22: note = chemically synthesized
  source 1..22: mol_type = other DNA
ctgtggtggcccacaaggagtg

SEQ ID NO: 51264 - DNA, 22 bp, synthetic construct
  misc_feature 1..22: note = chemically synthesized
  source 1..22: mol_type = other DNA
tggtggcccacaaggagtggag

SEQ ID NO: 51265 - DNA, 22 bp, synthetic construct
  misc_feature 1..22: note = chemically synthesized
  source 1..22: mol_type = other DNA
ggggacagggcaaaagctcatg

SEQ ID NO: 51266 - DNA, 22 bp, synthetic construct
  misc_feature 1..22: note = chemically synthesized
  source 1..22: mol_type = other DNA
gggacagggcaaaagctcatgt

SEQ ID NO: 51267 - DNA, 22 bp, synthetic construct
  misc_feature 1..22: note = chemically synthesized
  source 1..22: mol_type = other DNA
atgtgatagggatgctgtctct

SEQ ID NO: 51268 - DNA, 22 bp, synthetic construct
  misc_feature 1..22: note = chemically synthesized
  source 1..22: mol_type = other DNA
tctctgcaaccacatggatttt

SEQ ID NO: 51269 - DNA, 22 bp, synthetic construct
  misc_feature 1..22: note = chemically synthesized
  source 1..22: mol_type = other DNA
tgcaaccacatggattttaata

SEQ ID NO: 51270 - DNA, 22 bp, synthetic construct
  misc_feature 1..22: note = chemically synthesized
  source 1..22: mol_type = other DNA
caaccacatggattttaatagt

SEQ ID NO: 51271 - DNA, 22 bp, synthetic construct
  misc_feature 1..22: note = chemically synthesized
  source 1..22: mol_type = other DNA
taatagttacccatggctggct

SEQ ID NO: 51272 - DNA, 22 bp, synthetic construct
  misc_feature 1..22: note = chemically synthesized
  source 1..22: mol_type = other DNA
aatagttacccatggctggctt

SEQ ID NO: 51273 - DNA, 22 bp, synthetic construct
  misc_feature 1..22: note = chemically synthesized
  source 1..22: mol_type = other DNA
atagttacccatggctggcttc

SEQ ID NO: 51274 - DNA, 22 bp, synthetic construct
  misc_feature 1..22: note = chemically synthesized
  source 1..22: mol_type = other DNA
cccatggctggcttcagctttt

SEQ ID NO: 51275 - DNA, 22 bp, synthetic construct
  misc_feature 1..22: note = chemically synthesized
  source 1..22: mol_type = other DNA
gcttcagctttttttgtgaatg

SEQ ID NO: 51276 - DNA, 22 bp, synthetic construct
  misc_feature 1..22: note = chemically synthesized
  source 1..22: mol_type = other DNA
cagctttttttgtgaatggcag

SEQ ID NO: 51277 - DNA, 22 bp, synthetic construct
  misc_feature 1..22: note = chemically synthesized
  source 1..22: mol_type = other DNA
agctttttttgtgaatggcagc

SEQ ID NO: 51278 - DNA, 22 bp, synthetic construct
  misc_feature 1..22: note = chemically synthesized
  source 1..22: mol_type = other DNA
tttttgtgaatggcagccaaaa

SEQ ID NO: 51279 - DNA, 22 bp, synthetic construct
  misc_feature 1..22: note = chemically synthesized
  source 1..22: mol_type = other DNA
ttttgtgaatggcagccaaaaa

SEQ ID NO: 51280 - DNA, 22 bp, synthetic construct
  misc_feature 1..22: note = chemically synthesized
  source 1..22: mol_type = other DNA
tttgtgaatggcagccaaaaag

SEQ ID NO: 51281 - DNA, 22 bp, synthetic construct
  misc_feature 1..22: note = chemically synthesized
  source 1..22: mol_type = other DNA
ttgtgaatggcagccaaaaagt

SEQ ID NO: 51282 - DNA, 22 bp, synthetic construct
  misc_feature 1..22: note = chemically synthesized
  source 1..22: mol_type = other DNA
tgtgaatggcagccaaaaagtg

SEQ ID NO: 51283 - DNA, 22 bp, synthetic construct
  misc_feature 1..22: note = chemically synthesized
  source 1..22: mol_type = other DNA
gtgaatggcagccaaaaagtgt

SEQ ID NO: 51284 - DNA, 22 bp, synthetic construct
  misc_feature 1..22: note = chemically synthesized
  source 1..22: mol_type = other DNA
tgaatggcagccaaaaagtgtg

SEQ ID NO: 51285 - DNA, 22 bp, synthetic construct
  misc_feature 1..22: note = chemically synthesized
  source 1..22: mol_type = other DNA
agtggagacagaggggagactg

SEQ ID NO: 51286 - DNA, 22 bp, synthetic construct
  misc_feature 1..22: note = chemically synthesized
  source 1..22: mol_type = other DNA
ttgaatttgtggagtttttagt

SEQ ID NO: 51287 - DNA, 22 bp, synthetic construct
  misc_feature 1..22: note = chemically synthesized
  source 1..22: mol_type = other DNA
aatttgtggagtttttagttct

SEQ ID NO: 51288 - DNA, 22 bp, synthetic construct
  misc_feature 1..22: note = chemically synthesized
  source 1..22: mol_type = other DNA
gtggagtttttagttcttccta

SEQ ID NO: 51289 - DNA, 22 bp, synthetic construct
  misc_feature 1..22: note = chemically synthesized
  source 1..22: mol_type = other DNA
tggagtttttagttcttcctaa

SEQ ID NO: 51290 - DNA, 22 bp, synthetic construct
  misc_feature 1..22: note = chemically synthesized
  source 1..22: mol_type = other DNA
ttagttcttcctaaacagagag

SEQ ID NO: 51291 - DNA, 22 bp, synthetic construct
  misc_feature 1..22: note = chemically synthesized
  source 1..22: mol_type = other DNA
tagttcttcctaaacagagagc

SEQ ID NO: 51292 - DNA, 22 bp, synthetic construct
  misc_feature 1..22: note = chemically synthesized
  source 1..22: mol_type = other DNA
agttcttcctaaacagagagca

SEQ ID NO: 51293 - DNA, 22 bp, synthetic construct
  misc_feature 1..22: note = chemically synthesized
  source 1..22: mol_type = other DNA
gttcttcctaaacagagagcaa

SEQ ID NO: 51294 - DNA, 22 bp, synthetic construct
  misc_feature 1..22: note = chemically synthesized
  source 1..22: mol_type = other DNA
ttcctaaacagagagcaacaga

SEQ ID NO: 51295 - DNA, 22 bp, synthetic construct
  misc_feature 1..22: note = chemically synthesized
  source 1..22: mol_type = other DNA
cctaaacagagagcaacagaca

SEQ ID NO: 51296 - DNA, 22 bp, synthetic construct
  misc_feature 1..22: note = chemically synthesized
  source 1..22: mol_type = other DNA
ctaaacagagagcaacagacaa

SEQ ID NO: 51297 - DNA, 22 bp, synthetic construct
  misc_feature 1..22: note = chemically synthesized
  source 1..22: mol_type = other DNA
aacagagagcaacagacaagag

SEQ ID NO: 51298 - DNA, 22 bp, synthetic construct
  misc_feature 1..22: note = chemically synthesized
  source 1..22: mol_type = other DNA
cagacaaattaattcttttcgt

SEQ ID NO: 51299 - DNA, 22 bp, synthetic construct
  misc_feature 1..22: note = chemically synthesized
  source 1..22: mol_type = other DNA
attcttttcgttaatttaccct

SEQ ID NO: 51300 - DNA, 22 bp, synthetic construct
  misc_feature 1..22: note = chemically synthesized
  source 1..22: mol_type = other DNA
ttttcgttaatttaccctcaac

SEQ ID NO: 51301 - DNA, 22 bp, synthetic construct
  misc_feature 1..22: note = chemically synthesized
  source 1..22: mol_type = other DNA
ttcgttaatttaccctcaacta

SEQ ID NO: 51302 - DNA, 22 bp, synthetic construct
  misc_feature 1..22: note = chemically synthesized
  source 1..22: mol_type = other DNA
tcgttaatttaccctcaactac

SEQ ID NO: 51303 - DNA, 22 bp, synthetic construct
  misc_feature 1..22: note = chemically synthesized
  source 1..22: mol_type = other DNA
cgttaatttaccctcaactact

SEQ ID NO: 51304 - DNA, 22 bp, synthetic construct
  misc_feature 1..22: note = chemically synthesized
  source 1..22: mol_type = other DNA
gttaatttaccctcaactactg

SEQ ID NO: 51305 - DNA, 22 bp, synthetic construct
  misc_feature 1..22: note = chemically synthesized
  source 1..22: mol_type = other DNA
atttaccctcaactactggcca

SEQ ID NO: 51306 - DNA, 22 bp, synthetic construct
  misc_feature 1..22: note = chemically synthesized
  source 1..22: mol_type = other DNA
accctcaactactggccaagaa

SEQ ID NO: 51307 - DNA, 22 bp, synthetic construct
  misc_feature 1..22: note = chemically synthesized
  source 1..22: mol_type = other DNA
ccctcaactactggccaagaag

SEQ ID NO: 51308 - DNA, 22 bp, synthetic construct
  misc_feature 1..22: note = chemically synthesized
  source 1..22: mol_type = other DNA
aactactggccaagaaggggtg

SEQ ID NO: 51309 - DNA, 22 bp, synthetic construct
  misc_feature 1..22: note = chemically synthesized
  source 1..22: mol_type = other DNA
ctggccaagaaggggtgtaact

SEQ ID NO: 51310 - DNA, 22 bp, synthetic construct
  misc_feature 1..22: note = chemically synthesized
  source 1..22: mol_type = other DNA
gccaagaaggggtgtaactcag

SEQ ID NO: 51311 - DNA, 22 bp, synthetic construct
  misc_feature 1..22: note = chemically synthesized
  source 1..22: mol_type = other DNA
agaatgttttcttcttttgtgc

SEQ ID NO: 51312 - DNA, 22 bp, synthetic construct
  misc_feature 1..22: note = chemically synthesized
  source 1..22: mol_type = other DNA
tcttcttttgtgccctgagtag

SEQ ID NO: 51313 - DNA, 22 bp, synthetic construct
  misc_feature 1..22: note = chemically synthesized
  source 1..22: mol_type = other DNA
cttcttttgtgccctgagtagc

SEQ ID NO: 51314 - DNA, 22 bp, synthetic construct
  misc_feature 1..22: note = chemically synthesized
  source 1..22: mol_type = other DNA
ttcttttgtgccctgagtagca

SEQ ID NO: 51315 - DNA, 22 bp, synthetic construct
  misc_feature 1..22: note = chemically synthesized
  source 1..22: mol_type = other DNA
cttttgtgccctgagtagcaga

SEQ ID NO: 51316 - DNA, 22 bp, synthetic construct
  misc_feature 1..22: note = chemically synthesized
  source 1..22: mol_type = other DNA
ttttgtgccctgagtagcagac

SEQ ID NO: 51317 - DNA, 22 bp, synthetic construct
  misc_feature 1..22: note = chemically synthesized
  source 1..22: mol_type = other DNA
ttgtgccctgagtagcagaccc

SEQ ID NO: 51318 - DNA, 22 bp, synthetic construct
  misc_feature 1..22: note = chemically synthesized
  source 1..22: mol_type = other DNA
tgtgccctgagtagcagaccca

SEQ ID NO: 51319 - DNA, 22 bp, synthetic construct
  misc_feature 1..22: note = chemically synthesized
  source 1..22: mol_type = other DNA
gtgccctgagtagcagacccag

SEQ ID NO: 51320 - DNA, 22 bp, synthetic construct
  misc_feature 1..22: note = chemically synthesized
  source 1..22: mol_type = other DNA
tgccctgagtagcagacccaga

SEQ ID NO: 51321 - DNA, 22 bp, synthetic construct
  misc_feature 1..22: note = chemically synthesized
  source 1..22: mol_type = other DNA
agtagcagacccagagtctgga

SEQ ID NO: 51322 - DNA, 22 bp, synthetic construct
  misc_feature 1..22: note = chemically synthesized
  source 1..22: mol_type = other DNA
gagacccagattctaggcctgg

SEQ ID NO: 51323 - DNA, 22 bp, synthetic construct
  misc_feature 1..22: note = chemically synthesized
  source 1..22: mol_type = other DNA
taggcctggcttggccaacgac

SEQ ID NO: 51324 - DNA, 22 bp, synthetic construct
  misc_feature 1..22: note = chemically synthesized
  source 1..22: mol_type = other DNA
ggcctggcttggccaacgacaa

SEQ ID NO: 51325 - DNA, 22 bp, synthetic construct
  misc_feature 1..22: note = chemically synthesized
  source 1..22: mol_type = other DNA
gcttggccaacgacaagcaggg

SEQ ID NO: 51326 - DNA, 22 bp, synthetic construct
  misc_feature 1..22: note = chemically synthesized
  source 1..22: mol_type = other DNA
ggccaacgacaagcagggtgac

SEQ ID NO: 51327 - DNA, 22 bp, synthetic construct
  misc_feature 1..22: note = chemically synthesized
  source 1..22: mol_type = other DNA
gccaacgacaagcagggtgacc

SEQ ID NO: 51328 - DNA, 22 bp, synthetic construct
  misc_feature 1..22: note = chemically synthesized
  source 1..22: mol_type = other DNA
gggttaaaaaaaaaaaaaggca

SEQ ID NO: 51329 - DNA, 22 bp, synthetic construct
  misc_feature 1..22: note = chemically synthesized
  source 1..22: mol_type = other DNA
ggttaaaaaaaaaaaaaggcat

SEQ ID NO: 51330 - DNA, 22 bp, synthetic construct
  misc_feature 1..22: note = chemically synthesized
  source 1..22: mol_type = other DNA
aaaaaaaaaaaaggcatcattc

SEQ ID NO: 51331 - DNA, 22 bp, synthetic construct
  misc_feature 1..22: note = chemically synthesized
  source 1..22: mol_type = other DNA
tctgagtctcactccctcttct

SEQ ID NO: 51332 - DNA, 22 bp, synthetic construct
  misc_feature 1..22: note = chemically synthesized
  source 1..22: mol_type = other DNA
tgagtctcactccctcttctca

SEQ ID NO: 51333 - DNA, 22 bp, synthetic construct
  misc_feature 1..22: note = chemically synthesized
  source 1..22: mol_type = other DNA
agtctcactccctcttctcaaa

SEQ ID NO: 51334 - DNA, 22 bp, synthetic construct
  misc_feature 1..22: note = chemically synthesized
  source 1..22: mol_type = other DNA
actccctcttctcaaaaagatg

SEQ ID NO: 51335 - DNA, 22 bp, synthetic construct
  misc_feature 1..22: note = chemically synthesized
  source 1..22: mol_type = other DNA
cctcttctcaaaaagatggcaa

SEQ ID NO: 51336 - DNA, 22 bp, synthetic construct
  misc_feature 1..22: note = chemically synthesized
  source 1..22: mol_type = other DNA
ttctcaaaaagatggcaattcc

SEQ ID NO: 51337 - DNA, 22 bp, synthetic construct
  misc_feature 1..22: note = chemically synthesized
  source 1..22: mol_type = other DNA
ctcaaaaagatggcaattcctc

SEQ ID NO: 51338 - DNA, 22 bp, synthetic construct
  misc_feature 1..22: note = chemically synthesized
  source 1..22: mol_type = other DNA
tcaaaaagatggcaattcctcc

SEQ ID NO: 51339 - DNA, 22 bp, synthetic construct
  misc_feature 1..22: note = chemically synthesized
  source 1..22: mol_type = other DNA
aaaaagatggcaattcctcccc

SEQ ID NO: 51340 - DNA, 22 bp, synthetic construct
  misc_feature 1..22: note = chemically synthesized
  source 1..22: mol_type = other DNA
ctcccccgctggttttccatag

SEQ ID NO: 51341 - DNA, 22 bp, synthetic construct
  misc_feature 1..22: note = chemically synthesized
  source 1..22: mol_type = other DNA
ccccgctggttttccatagttg

SEQ ID NO: 51342 - DNA, 22 bp, synthetic construct
  misc_feature 1..22: note = chemically synthesized
  source 1..22: mol_type = other DNA
gttttccatagttgaggtagca

SEQ ID NO: 51343 - DNA, 22 bp, synthetic construct
  misc_feature 1..22: note = chemically synthesized
  source 1..22: mol_type = other DNA
tccatagttgaggtagcaagcc

SEQ ID NO: 51344 - DNA, 22 bp, synthetic construct
  misc_feature 1..22: note = chemically synthesized
  source 1..22: mol_type = other DNA
ccatagttgaggtagcaagcca

SEQ ID NO: 51345 - DNA, 22 bp, synthetic construct
  misc_feature 1..22: note = chemically synthesized
  source 1..22: mol_type = other DNA
catagttgaggtagcaagccaa

SEQ ID NO: 51346 - DNA, 22 bp, synthetic construct
  misc_feature 1..22: note = chemically synthesized
  source 1..22: mol_type = other DNA
aggtagcaagccaatgtgttgg

SEQ ID NO: 51347 - DNA, 22 bp, synthetic construct
  misc_feature 1..22: note = chemically synthesized
  source 1..22: mol_type = other DNA
gggtagctgaaaacgccctgtg

SEQ ID NO: 51348 - DNA, 22 bp, synthetic construct
  misc_feature 1..22: note = chemically synthesized
  source 1..22: mol_type = other DNA
aaaacgccctgtgcatactgag

SEQ ID NO: 51349 - DNA, 22 bp, synthetic construct
  misc_feature 1..22: note = chemically synthesized
  source 1..22: mol_type = other DNA
tgcatactgaggcttatgttcc

SEQ ID NO: 51350 - DNA, 22 bp, synthetic construct
  misc_feature 1..22: note = chemically synthesized
  source 1..22: mol_type = other DNA
aggcttatgttccatggggggc

SEQ ID NO: 51351 - DNA, 22 bp, synthetic construct
  misc_feature 1..22: note = chemically synthesized
  source 1..22: mol_type = other DNA
atgttccatggggggccagggg

SEQ ID NO: 51352 - DNA, 22 bp, synthetic construct
  misc_feature 1..22: note = chemically synthesized
  source 1..22: mol_type = other DNA
tgttccatggggggccaggggc

SEQ ID NO: 51353 - DNA, 22 bp, synthetic construct
  misc_feature 1..22: note = chemically synthesized
  source 1..22: mol_type = other DNA
catggggggccaggggccagga

SEQ ID NO: 51354 - DNA, 22 bp, synthetic construct
  misc_feature 1..22: note = chemically synthesized
  source 1..22: mol_type = other DNA
tcatctccagctgggaggtgat

SEQ ID NO: 51355 - DNA, 22 bp, synthetic construct
  misc_feature 1..22: note = chemically synthesized
  source 1..22: mol_type = other DNA
cagctgggaggtgatggccatg

SEQ ID NO: 51356 - DNA, 22 bp, synthetic construct
  misc_feature 1..22: note = chemically synthesized
  source 1..22: mol_type = other DNA
ggaggtgatggccatgcctgca

SEQ ID NO: 51357 - DNA, 22 bp, synthetic construct
  misc_feature 1..22: note = chemically synthesized
  source 1..22: mol_type = other DNA
cacccctctggccagcagaggg

SEQ ID NO: 51358 - DNA, 22 bp, synthetic construct
  misc_feature 1..22: note = chemically synthesized
  source 1..22: mol_type = other DNA
tggccagcagagggtggtcagt

SEQ ID NO: 51359 - DNA, 22 bp, synthetic construct
  misc_feature 1..22: note = chemically synthesized
  source 1..22: mol_type = other DNA
gccagcagagggtggtcagtag

SEQ ID NO: 51360 - DNA, 22 bp, synthetic construct
  misc_feature 1..22: note = chemically synthesized
  source 1..22: mol_type = other DNA
ggaggccattagggcaaccttc

SEQ ID NO: 51361 - DNA, 22 bp, synthetic construct
  misc_feature 1..22: note = chemically synthesized
  source 1..22: mol_type = other DNA
gggcaaccttctattggctcag

SEQ ID NO: 51362 - DNA, 22 bp, synthetic construct
  misc_feature 1..22: note = chemically synthesized
  source 1..22: mol_type = other DNA
ctattggctcagactcagaatg

SEQ ID NO: 51363 - DNA, 22 bp, synthetic construct
  misc_feature 1..22: note = chemically synthesized
  source 1..22: mol_type = other DNA
tattggctcagactcagaatgc

SEQ ID NO: 51364 - DNA, 22 bp, synthetic construct
  misc_feature 1..22: note = chemically synthesized
  source 1..22: mol_type = other DNA
ttggctcagactcagaatgcag

SEQ ID NO: 51365 - DNA, 22 bp, synthetic construct
  misc_feature 1..22: note = chemically synthesized
  source 1..22: mol_type = other DNA
gctcagactcagaatgcagtag

SEQ ID NO: 51366 - DNA, 22 bp, synthetic construct
  misc_feature 1..22: note = chemically synthesized
  source 1..22: mol_type = other DNA
agactcagaatgcagtagaact

SEQ ID NO: 51367 - DNA, 22 bp, synthetic construct
  misc_feature 1..22: note = chemically synthesized
  source 1..22: mol_type = other DNA
agaatgcagtagaacttgtgcc

SEQ ID NO: 51368 - DNA, 22 bp, synthetic construct
  misc_feature 1..22: note = chemically synthesized
  source 1..22: mol_type = other DNA
gtgccctgtagtgttcatggac

SEQ ID NO: 51369 - DNA, 22 bp, synthetic construct
  misc_feature 1..22: note = chemically synthesized
  source 1..22: mol_type = other DNA
tgccctgtagtgttcatggaca

SEQ ID NO: 51370 - DNA, 22 bp, synthetic construct
  misc_feature 1..22: note = chemically synthesized
  source 1..22: mol_type = other DNA
tagtgttcatggacaggagtga

SEQ ID NO: 51371 - DNA, 22 bp, synthetic construct
  misc_feature 1..22: note = chemically synthesized
  source 1..22: mol_type = other DNA
atggacaggagtgagaggagga

SEQ ID NO: 51372 - DNA, 22 bp, synthetic construct
  misc_feature 1..22: note = chemically synthesized
  source 1..22: mol_type = other DNA
aggggatgtggctgtcaaggcc

SEQ ID NO: 51373 - DNA, 22 bp, synthetic construct
  misc_feature 1..22: note = chemically synthesized
  source 1..22: mol_type = other DNA
tcaaggcctttctaggggcgat

SEQ ID NO: 51374 - DNA, 22 bp, synthetic construct
  misc_feature 1..22: note = chemically synthesized
  source 1..22: mol_type = other DNA
tctaggggcgatgctgtctctc

SEQ ID NO: 51375 - DNA, 22 bp, synthetic construct
  misc_feature 1..22: note = chemically synthesized
  source 1..22: mol_type = other DNA
ctaggggcgatgctgtctctcc

SEQ ID NO: 51376 - DNA, 22 bp, synthetic construct
  misc_feature 1..22: note = chemically synthesized
  source 1..22: mol_type = other DNA
taggggcgatgctgtctctccc

SEQ ID NO: 51377 - DNA, 22 bp, synthetic construct
  misc_feature 1..22: note = chemically synthesized
  source 1..22: mol_type = other DNA
ggggcgatgctgtctctccctc

SEQ ID NO: 51378 - DNA, 22 bp, synthetic construct
  misc_feature 1..22: note = chemically synthesized
  source 1..22: mol_type = other DNA
tctctccctcagcatagggagt

SEQ ID NO: 51379 - DNA, 22 bp, synthetic construct
  misc_feature 1..22: note = chemically synthesized
  source 1..22: mol_type = other DNA
tccctcagcatagggagtgggc

SEQ ID NO: 51380 - DNA, 22 bp, synthetic construct
  misc_feature 1..22: note = chemically synthesized
  source 1..22: mol_type = other DNA
cctcagcatagggagtgggccc

SEQ ID NO: 51381 - DNA, 22 bp, synthetic construct
  misc_feature 1..22: note = chemically synthesized
  source 1..22: mol_type = other DNA
agcatagggagtgggcccttcc

SEQ ID NO: 51382 - DNA, 22 bp, synthetic construct
  misc_feature 1..22: note = chemically synthesized
  source 1..22: mol_type = other DNA
ccacctctggcctctctccccc

SEQ ID NO: 51383 - DNA, 22 bp, synthetic construct
  misc_feature 1..22: note = chemically synthesized
  source 1..22: mol_type = other DNA
cacctctggcctctctccccca

SEQ ID NO: 51384 - DNA, 22 bp, synthetic construct
  misc_feature 1..22: note = chemically synthesized
  source 1..22: mol_type = other DNA
tggcctctctcccccagggctg

SEQ ID NO: 51385 - DNA, 22 bp, synthetic construct
  misc_feature 1..22: note = chemically synthesized
  source 1..22: mol_type = other DNA
gcctctctcccccagggctgtg

SEQ ID NO: 51386 - DNA, 22 bp, synthetic construct
  misc_feature 1..22: note = chemically synthesized
  source 1..22: mol_type = other DNA
tctcccccagggctgtgtctgg

SEQ ID NO: 51387 - DNA, 22 bp, synthetic construct
  misc_feature 1..22: note = chemically synthesized
  source 1..22: mol_type = other DNA
tcccccagggctgtgtctggct

SEQ ID NO: 51388 - DNA, 22 bp, synthetic construct
  misc_feature 1..22: note = chemically synthesized
  source 1..22: mol_type = other DNA
ccccagggctgtgtctggctgt

SEQ ID NO: 51389 - DNA, 22 bp, synthetic construct
  misc_feature 1..22: note = chemically synthesized
  source 1..22: mol_type = other DNA
tgtctggctgtccctgataaaa

SEQ ID NO: 51390 - DNA, 22 bp, synthetic construct
  misc_feature 1..22: note = chemically synthesized
  source 1..22: mol_type = other DNA
gctgtccctgataaaactgtga

SEQ ID NO: 51391 - DNA, 22 bp, synthetic construct
  misc_feature 1..22: note = chemically synthesized
  source 1..22: mol_type = other DNA
tccctgataaaactgtgagatg

SEQ ID NO: 51392 - DNA, 22 bp, synthetic construct
  misc_feature 1..22: note = chemically synthesized
  source 1..22: mol_type = other DNA
ataaaactgtgagatggtgtgc

SEQ ID NO: 51393 - DNA, 22 bp, synthetic construct
  misc_feature 1..22: note = chemically synthesized
  source 1..22: mol_type = other DNA
tgagatggtgtgcagtgtcgga

SEQ ID NO: 51394 - DNA, 22 bp, synthetic construct
  misc_feature 1..22: note = chemically synthesized
  source 1..22: mol_type = other DNA
agtgccagagtttccgcgacca

SEQ ID NO: 51395 - DNA, 22 bp, synthetic construct
  misc_feature 1..22: note = chemically synthesized
  source 1..22: mol_type = other DNA
ccgcgaccatatgaaaagcgtc

SEQ ID NO: 51396 - DNA, 22 bp, synthetic construct
  misc_feature 1..22: note = chemically synthesized
  source 1..22: mol_type = other DNA
cgcgaccatatgaaaagcgtca

SEQ ID NO: 51397 - DNA, 22 bp, synthetic construct
  misc_feature 1..22: note = chemically synthesized
  source 1..22: mol_type = other DNA
catccgatggtcccagtgttgc

SEQ ID NO: 51398 - DNA, 22 bp, synthetic construct
  misc_feature 1..22: note = chemically synthesized
  source 1..22: mol_type = other DNA
cttgtgtgaagaaagcctccta

SEQ ID NO: 51399 - DNA, 22 bp, synthetic construct
  misc_feature 1..22: note = chemically synthesized
  source 1..22: mol_type = other DNA
gtgtgaagaaagcctcctacct

SEQ ID NO: 51400 - DNA, 22 bp, synthetic construct
  misc_feature 1..22: note = chemically synthesized
  source 1..22: mol_type = other DNA
tgtgaagaaagcctcctacctt

SEQ ID NO: 51401 - DNA, 22 bp, synthetic construct
  misc_feature 1..22: note = chemically synthesized
  source 1..22: mol_type = other DNA
ctaccttgattgcatcagggcc

SEQ ID NO: 51402 - DNA, 22 bp, synthetic construct
  misc_feature 1..22: note = chemically synthesized
  source 1..22: mol_type = other DNA
ccttgattgcatcagggccatt

SEQ ID NO: 51403 - DNA, 22 bp, synthetic construct
  misc_feature 1..22: note = chemically synthesized
  source 1..22: mol_type = other DNA
atgcaatcaaggtaggaggctt

SEQ ID NO: 51404 - DNA, 22 bp, synthetic construct
  misc_feature 1..22: note = chemically synthesized
  source 1..22: mol_type = other DNA
tcttcacacaagcaacactggg

SEQ ID NO: 51405 - DNA, 22 bp, synthetic construct
  misc_feature 1..22: note = chemically synthesized
  source 1..22: mol_type = other DNA
cttcacacaagcaacactggga

SEQ ID NO: 51406 - DNA, 22 bp, synthetic construct
  misc_feature 1..22: note = chemically synthesized
  source 1..22: mol_type = other DNA
ttcacacaagcaacactgggac

SEQ ID NO: 51407 - DNA, 22 bp, synthetic construct
  misc_feature 1..22: note = chemically synthesized
  source 1..22: mol_type = other DNA
cacacaagcaacactgggacca

SEQ ID NO: 51408 - DNA, 22 bp, synthetic construct
  misc_feature 1..22: note = chemically synthesized
  source 1..22: mol_type = other DNA
acacaagcaacactgggaccat

SEQ ID NO: 51409 - DNA, 22 bp, synthetic construct
  misc_feature 1..22: note = chemically synthesized
  source 1..22: mol_type = other DNA
ggaccatcggatggaatgacgc

SEQ ID NO: 51410 - DNA, 22 bp, synthetic construct
  misc_feature 1..22: note = chemically synthesized
  source 1..22: mol_type = other DNA
ttcatatggtcgcggaaactct

SEQ ID NO: 51411 - DNA, 22 bp, synthetic construct
  misc_feature 1..22: note = chemically synthesized
  source 1..22: mol_type = other DNA
tcatatggtcgcggaaactctg

SEQ ID NO: 51412 - DNA, 22 bp, synthetic construct
  misc_feature 1..22: note = chemically synthesized
  source 1..22: mol_type = other DNA
catatggtcgcggaaactctgg

SEQ ID NO: 51413 - DNA, 22 bp, synthetic construct
  misc_feature 1..22: note = chemically synthesized
  source 1..22: mol_type = other DNA
atatggtcgcggaaactctggc

SEQ ID NO: 51414 - DNA, 22 bp, synthetic construct
  misc_feature 1..22: note = chemically synthesized
  source 1..22: mol_type = other DNA
tggcacttagtggcctcatgct

SEQ ID NO: 51415 - DNA, 22 bp, synthetic construct
  misc_feature 1..22: note = chemically synthesized
  source 1..22: mol_type = other DNA
gcacttagtggcctcatgctcc

SEQ ID NO: 51416 - DNA, 22 bp, synthetic construct
  misc_feature 1..22: note = chemically synthesized
  source 1..22: mol_type = other DNA
agtggcctcatgctccgacact

SEQ ID NO: 51417 - DNA, 22 bp, synthetic construct
  misc_feature 1..22: note = chemically synthesized
  source 1..22: mol_type = other DNA
gtggcctcatgctccgacactg

SEQ ID NO: 51418 - DNA, 22 bp, synthetic construct
  misc_feature 1..22: note = chemically synthesized
  source 1..22: mol_type = other DNA
atgctccgacactgcacaccat

SEQ ID NO: 51419 - DNA, 22 bp, synthetic construct
  misc_feature 1..22: note = chemically synthesized
  source 1..22: mol_type = other DNA
cgacactgcacaccatctcaca

SEQ ID NO: 51420 - DNA, 22 bp, synthetic construct
  misc_feature 1..22: note = chemically synthesized
  source 1..22: mol_type = other DNA
cacaccatctcacagttttatc

SEQ ID NO: 51421 - DNA, 22 bp, synthetic construct
  misc_feature 1..22: note = chemically synthesized
  source 1..22: mol_type = other DNA
acagttttatcagggacagcca

SEQ ID NO: 51422 - DNA, 22 bp, synthetic construct
  misc_feature 1..22: note = chemically synthesized
  source 1..22: mol_type = other DNA
tatcagggacagccagacacag

SEQ ID NO: 51423 - DNA, 22 bp, synthetic construct
  misc_feature 1..22: note = chemically synthesized
  source 1..22: mol_type = other DNA
atcagggacagccagacacagc

SEQ ID NO: 51424 - DNA, 22 bp, synthetic construct
  misc_feature 1..22: note = chemically synthesized
  source 1..22: mol_type = other DNA
tcagggacagccagacacagcc

SEQ ID NO: 51425 - DNA, 22 bp, synthetic construct
  misc_feature 1..22: note = chemically synthesized
  source 1..22: mol_type = other DNA
ggggagagaggccagaggtgga

SEQ ID NO: 51426 - DNA, 22 bp, synthetic construct
  misc_feature 1..22: note = chemically synthesized
  source 1..22: mol_type = other DNA
cctatgctgagggagagacagc

SEQ ID NO: 51427 - DNA, 22 bp, synthetic construct
  misc_feature 1..22: note = chemically synthesized
  source 1..22: mol_type = other DNA
tgctgagggagagacagcatcg

SEQ ID NO: 51428 - DNA, 22 bp, synthetic construct
  misc_feature 1..22: note = chemically synthesized
  source 1..22: mol_type = other DNA
agggagagacagcatcgcccct

SEQ ID NO: 51429 - DNA, 22 bp, synthetic construct
  misc_feature 1..22: note = chemically synthesized
  source 1..22: mol_type = other DNA
gaaaggccttgacagccacatc

SEQ ID NO: 51430 - DNA, 22 bp, synthetic construct
  misc_feature 1..22: note = chemically synthesized
  source 1..22: mol_type = other DNA
gacagccacatcccctcagtcc

SEQ ID NO: 51431 - DNA, 22 bp, synthetic construct
  misc_feature 1..22: note = chemically synthesized
  source 1..22: mol_type = other DNA
acagccacatcccctcagtcct

SEQ ID NO: 51432 - DNA, 22 bp, synthetic construct
  misc_feature 1..22: note = chemically synthesized
  source 1..22: mol_type = other DNA
agtcctgtcctcctctcactcc

SEQ ID NO: 51433 - DNA, 22 bp, synthetic construct
  misc_feature 1..22: note = chemically synthesized
  source 1..22: mol_type = other DNA
tcctcctctcactcctgtccat

SEQ ID NO: 51434 - DNA, 22 bp, synthetic construct
  misc_feature 1..22: note = chemically synthesized
  source 1..22: mol_type = other DNA
ctctcactcctgtccatgaaca

SEQ ID NO: 51435 - DNA, 22 bp, synthetic construct
  misc_feature 1..22: note = chemically synthesized
  source 1..22: mol_type = other DNA
tcactcctgtccatgaacacta

SEQ ID NO: 51436 - DNA, 22 bp, synthetic construct
  misc_feature 1..22: note = chemically synthesized
  source 1..22: mol_type = other DNA
actcctgtccatgaacactaca

SEQ ID NO: 51437 - DNA, 22 bp, synthetic construct
  misc_feature 1..22: note = chemically synthesized
  source 1..22: mol_type = other DNA
ctgtccatgaacactacagggc

SEQ ID NO: 51438 - DNA, 22 bp, synthetic construct
  misc_feature 1..22: note = chemically synthesized
  source 1..22: mol_type = other DNA
tccatgaacactacagggcaca

SEQ ID NO: 51439 - DNA, 22 bp, synthetic construct
  misc_feature 1..22: note = chemically synthesized
  source 1..22: mol_type = other DNA
cagggcacaagttctactgcat

SEQ ID NO: 51440 - DNA, 22 bp, synthetic construct
  misc_feature 1..22: note = chemically synthesized
  source 1..22: mol_type = other DNA
tactgcattctgagtctgagcc

SEQ ID NO: 51441 - DNA, 22 bp, synthetic construct
  misc_feature 1..22: note = chemically synthesized
  source 1..22: mol_type = other DNA
ctgcattctgagtctgagccaa

SEQ ID NO: 51442 - DNA, 22 bp, synthetic construct
  misc_feature 1..22: note = chemically synthesized
  source 1..22: mol_type = other DNA
cattctgagtctgagccaatag

SEQ ID NO: 51443 - DNA, 22 bp, synthetic construct
  misc_feature 1..22: note = chemically synthesized
  source 1..22: mol_type = other DNA
tgagtctgagccaatagaaggt

SEQ ID NO: 51444 - DNA, 22 bp, synthetic construct
  misc_feature 1..22: note = chemically synthesized
  source 1..22: mol_type = other DNA
agtctgagccaatagaaggttg

SEQ ID NO: 51445 - DNA, 22 bp, synthetic construct
  misc_feature 1..22: note = chemically synthesized
  source 1..22: mol_type = other DNA
agccaatagaaggttgccctaa

SEQ ID NO: 51446 - DNA, 22 bp, synthetic construct
  misc_feature 1..22: note = chemically synthesized
  source 1..22: mol_type = other DNA
ccctaatggcctcccagtttcc

SEQ ID NO: 51447 - DNA, 22 bp, synthetic construct
  misc_feature 1..22: note = chemically synthesized
  source 1..22: mol_type = other DNA
atggcctcccagtttcctactg

SEQ ID NO: 51448 - DNA, 22 bp, synthetic construct
  misc_feature 1..22: note = chemically synthesized
  source 1..22: mol_type = other DNA
ccagtttcctactgaccaccct

SEQ ID NO: 51449 - DNA, 22 bp, synthetic construct
  misc_feature 1..22: note = chemically synthesized
  source 1..22: mol_type = other DNA
cctactgaccaccctctgctgg

SEQ ID NO: 51450 - DNA, 22 bp, synthetic construct
  misc_feature 1..22: note = chemically synthesized
  source 1..22: mol_type = other DNA
ctactgaccaccctctgctggc

SEQ ID NO: 51451 - DNA, 22 bp, synthetic construct
  misc_feature 1..22: note = chemically synthesized
  source 1..22: mol_type = other DNA
ctgaccaccctctgctggccag

SEQ ID NO: 51452 - DNA, 22 bp, synthetic construct
  misc_feature 1..22: note = chemically synthesized
  source 1..22: mol_type = other DNA
accaccctctgctggccagagg

SEQ ID NO: 51453 - DNA, 22 bp, synthetic construct
  misc_feature 1..22: note = chemically synthesized
  source 1..22: mol_type = other DNA
tgctggccagaggggtgcaggc

SEQ ID NO: 51454 - DNA, 22 bp, synthetic construct
  misc_feature 1..22: note = chemically synthesized
  source 1..22: mol_type = other DNA
ctggccagaggggtgcaggcat

SEQ ID NO: 51455 - DNA, 22 bp, synthetic construct
  misc_feature 1..22: note = chemically synthesized
  source 1..22: mol_type = other DNA
gccagaggggtgcaggcatggc

SEQ ID NO: 51456 - DNA, 22 bp, synthetic construct
  misc_feature 1..22: note = chemically synthesized
  source 1..22: mol_type = other DNA
ccagctggagatgacaatctgc

SEQ ID NO: 51457 - DNA, 22 bp, synthetic construct
  misc_feature 1..22: note = chemically synthesized
  source 1..22: mol_type = other DNA
gagatgacaatctgctcctctg

SEQ ID NO: 51458 - DNA, 22 bp, synthetic construct
  misc_feature 1..22: note = chemically synthesized
  source 1..22: mol_type = other DNA
ctcctctgtatccgccttgtct

SEQ ID NO: 51459 - DNA, 22 bp, synthetic construct
  misc_feature 1..22: note = chemically synthesized
  source 1..22: mol_type = other DNA
ctctgtatccgccttgtctcct

SEQ ID NO: 51460 - DNA, 22 bp, synthetic construct
  misc_feature 1..22: note = chemically synthesized
  source 1..22: mol_type = other DNA
tgtatccgccttgtctcctccc

SEQ ID NO: 51461 - DNA, 22 bp, synthetic construct
  misc_feature 1..22: note = chemically synthesized
  source 1..22: mol_type = other DNA
tatccgccttgtctcctcccat

SEQ ID NO: 51462 - DNA, 22 bp, synthetic construct
  misc_feature 1..22: note = chemically synthesized
  source 1..22: mol_type = other DNA
gtctcctcccatcactgtcctg

SEQ ID NO: 51463 - DNA, 22 bp, synthetic construct
  misc_feature 1..22: note = chemically synthesized
  source 1..22: mol_type = other DNA
tctcctcccatcactgtcctgg

SEQ ID NO: 51464 - DNA, 22 bp, synthetic construct
  misc_feature 1..22: note = chemically synthesized
  source 1..22: mol_type = other DNA
ctcccatcactgtcctggcccc

SEQ ID NO: 51465 - DNA, 22 bp, synthetic construct
  misc_feature 1..22: note = chemically synthesized
  source 1..22: mol_type = other DNA
ccatcactgtcctggcccctgg

SEQ ID NO: 51466 - DNA, 22 bp, synthetic construct
  misc_feature 1..22: note = chemically synthesized
  source 1..22: mol_type = other DNA
tcctggcccctggccccccatg

SEQ ID NO: 51467 - DNA, 22 bp, synthetic construct
  misc_feature 1..22: note = chemically synthesized
  source 1..22: mol_type = other DNA
gcccctggccccccatggaaca

SEQ ID NO: 51468 - DNA, 22 bp, synthetic construct
  misc_feature 1..22: note = chemically synthesized
  source 1..22: mol_type = other DNA
gccccccatggaacataagcct

SEQ ID NO: 51469 - DNA, 22 bp, synthetic construct
  misc_feature 1..22: note = chemically synthesized
  source 1..22: mol_type = other DNA
agtatgcacagggcgttttcag

SEQ ID NO: 51470 - DNA, 22 bp, synthetic construct
  misc_feature 1..22: note = chemically synthesized
  source 1..22: mol_type = other DNA
tcagctaccccaacacattggc

SEQ ID NO: 51471 - DNA, 22 bp, synthetic construct
  misc_feature 1..22: note = chemically synthesized
  source 1..22: mol_type = other DNA
cagctaccccaacacattggct

SEQ ID NO: 51472 - DNA, 22 bp, synthetic construct
  misc_feature 1..22: note = chemically synthesized
  source 1..22: mol_type = other DNA
agctaccccaacacattggctt

SEQ ID NO: 51473 - DNA, 22 bp, synthetic construct
  misc_feature 1..22: note = chemically synthesized
  source 1..22: mol_type = other DNA
ccccaacacattggcttgctac

SEQ ID NO: 51474 - DNA, 22 bp, synthetic construct
  misc_feature 1..22: note = chemically synthesized
  source 1..22: mol_type = other DNA
gcttgctacctcaactatggaa

SEQ ID NO: 51475 - DNA, 22 bp, synthetic construct
  misc_feature 1..22: note = chemically synthesized
  source 1..22: mol_type = other DNA
gctacctcaactatggaaaacc

SEQ ID NO: 51476 - DNA, 22 bp, synthetic construct
  misc_feature 1..22: note = chemically synthesized
  source 1..22: mol_type = other DNA
ctacctcaactatggaaaacca

SEQ ID NO: 51477 - DNA, 22 bp, synthetic construct
  misc_feature 1..22: note = chemically synthesized
  source 1..22: mol_type = other DNA
cctcaactatggaaaaccagcg

SEQ ID NO: 51478 - DNA, 22 bp, synthetic construct
  misc_feature 1..22: note = chemically synthesized
  source 1..22: mol_type = other DNA
aactatggaaaaccagcggggg

SEQ ID NO: 51479 - DNA, 22 bp, synthetic construct
  misc_feature 1..22: note = chemically synthesized
  source 1..22: mol_type = other DNA
tggaaaaccagcgggggaggaa

SEQ ID NO: 51480 - DNA, 22 bp, synthetic construct
  misc_feature 1..22: note = chemically synthesized
  source 1..22: mol_type = other DNA
ccatctttttgagaagagggag

SEQ ID NO: 51481 - DNA, 22 bp, synthetic construct
  misc_feature 1..22: note = chemically synthesized
  source 1..22: mol_type = other DNA
tttgagaagagggagtgagact

SEQ ID NO: 51482 - DNA, 22 bp, synthetic construct
  misc_feature 1..22: note = chemically synthesized
  source 1..22: mol_type = other DNA
ttgagaagagggagtgagactc

SEQ ID NO: 51483 - DNA, 22 bp, synthetic construct
  misc_feature 1..22: note = chemically synthesized
  source 1..22: mol_type = other DNA
tgagaagagggagtgagactca

SEQ ID NO: 51484 - DNA, 22 bp, synthetic construct
  misc_feature 1..22: note = chemically synthesized
  source 1..22: mol_type = other DNA
gagaagagggagtgagactcag

SEQ ID NO: 51485 - DNA, 22 bp, synthetic construct
  misc_feature 1..22: note = chemically synthesized
  source 1..22: mol_type = other DNA
agaagagggagtgagactcaga

SEQ ID NO: 51486 - DNA, 22 bp, synthetic construct
  misc_feature 1..22: note = chemically synthesized
  source 1..22: mol_type = other DNA
agagaatgatgccttttttttt

SEQ ID NO: 51487 - DNA, 22 bp, synthetic construct
  misc_feature 1..22: note = chemically synthesized
  source 1..22: mol_type = other DNA
tttttttttttaacccaaggtc

SEQ ID NO: 51488 - DNA, 22 bp, synthetic construct
  misc_feature 1..22: note = chemically synthesized
  source 1..22: mol_type = other DNA
ttttttttttaacccaaggtca

SEQ ID NO: 51489 - DNA, 22 bp, synthetic construct
  misc_feature 1..22: note = chemically synthesized
  source 1..22: mol_type = other DNA
tttttttttaacccaaggtcac

SEQ ID NO: 51490 - DNA, 22 bp, synthetic construct
  misc_feature 1..22: note = chemically synthesized
  source 1..22: mol_type = other DNA
ttttttttaacccaaggtcacc

SEQ ID NO: 51491 - DNA, 22 bp, synthetic construct
  misc_feature 1..22: note = chemically synthesized
  source 1..22: mol_type = other DNA
tttttttaacccaaggtcaccc

SEQ ID NO: 51492 - DNA, 22 bp, synthetic construct
  misc_feature 1..22: note = chemically synthesized
  source 1..22: mol_type = other DNA
ttttttaacccaaggtcaccct

SEQ ID NO: 51493 - DNA, 22 bp, synthetic construct
  misc_feature 1..22: note = chemically synthesized
  source 1..22: mol_type = other DNA
tttttaacccaaggtcaccctg

SEQ ID NO: 51494 - DNA, 22 bp, synthetic construct
  misc_feature 1..22: note = chemically synthesized
  source 1..22: mol_type = other DNA
ttttaacccaaggtcaccctgc

SEQ ID NO: 51495 - DNA, 22 bp, synthetic construct
  misc_feature 1..22: note = chemically synthesized
  source 1..22: mol_type = other DNA
tttaacccaaggtcaccctgct

SEQ ID NO: 51496 - DNA, 22 bp, synthetic construct
  misc_feature 1..22: note = chemically synthesized
  source 1..22: mol_type = other DNA
ttaacccaaggtcaccctgctt

SEQ ID NO: 51497 - DNA, 22 bp, synthetic construct
  misc_feature 1..22: note = chemically synthesized
  source 1..22: mol_type = other DNA
taacccaaggtcaccctgcttg

SEQ ID NO: 51498 - DNA, 22 bp, synthetic construct
  misc_feature 1..22: note = chemically synthesized
  source 1..22: mol_type = other DNA
aacccaaggtcaccctgcttgt

SEQ ID NO: 51499 - DNA, 22 bp, synthetic construct
  misc_feature 1..22: note = chemically synthesized
  source 1..22: mol_type = other DNA
acccaaggtcaccctgcttgtc

SEQ ID NO: 51500 - DNA, 22 bp, synthetic construct
  misc_feature 1..22: note = chemically synthesized
  source 1..22: mol_type = other DNA
cttgtcgttggccaagccaggc

SEQ ID NO: 51501 - DNA, 22 bp, synthetic construct
  misc_feature 1..22: note = chemically synthesized
  source 1..22: mol_type = other DNA
gtcgttggccaagccaggccta

SEQ ID NO: 51502 - DNA, 22 bp, synthetic construct
  misc_feature 1..22: note = chemically synthesized
  source 1..22: mol_type = other DNA
tcgttggccaagccaggcctag

SEQ ID NO: 51503 - DNA, 22 bp, synthetic construct
  misc_feature 1..22: note = chemically synthesized
  source 1..22: mol_type = other DNA
gccaagccaggcctagaatctg

SEQ ID NO: 51504 - DNA, 22 bp, synthetic construct
  misc_feature 1..22: note = chemically synthesized
  source 1..22: mol_type = other DNA
gaatctgggtctccagactctg

SEQ ID NO: 51505 - DNA, 22 bp, synthetic construct
  misc_feature 1..22: note = chemically synthesized
  source 1..22: mol_type = other DNA
ggtctccagactctgggtctgc

SEQ ID NO: 51506 - DNA, 22 bp, synthetic construct
  misc_feature 1..22: note = chemically synthesized
  source 1..22: mol_type = other DNA
cagactctgggtctgctactca

SEQ ID NO: 51507 - DNA, 22 bp, synthetic construct
  misc_feature 1..22: note = chemically synthesized
  source 1..22: mol_type = other DNA
tgggtctgctactcagggcaca

SEQ ID NO: 51508 - DNA, 22 bp, synthetic construct
  misc_feature 1..22: note = chemically synthesized
  source 1..22: mol_type = other DNA
ggtctgctactcagggcacaaa

SEQ ID NO: 51509 - DNA, 22 bp, synthetic construct
  misc_feature 1..22: note = chemically synthesized
  source 1..22: mol_type = other DNA
ctactcagggcacaaaagaaga

SEQ ID NO: 51510 - DNA, 22 bp, synthetic construct
  misc_feature 1..22: note = chemically synthesized
  source 1..22: mol_type = other DNA
ctcagggcacaaaagaagaaaa

SEQ ID NO: 51511 - DNA, 22 bp, synthetic construct
  misc_feature 1..22: note = chemically synthesized
  source 1..22: mol_type = other DNA
agggcacaaaagaagaaaacat

SEQ ID NO: 51512 - DNA, 22 bp, synthetic construct
  misc_feature 1..22: note = chemically synthesized
  source 1..22: mol_type = other DNA
tgagttacaccccttcttggcc

SEQ ID NO: 51513 - DNA, 22 bp, synthetic construct
  misc_feature 1..22: note = chemically synthesized
  source 1..22: mol_type = other DNA
agttacaccccttcttggccag

SEQ ID NO: 51514 - DNA, 22 bp, synthetic construct
  misc_feature 1..22: note = chemically synthesized
  source 1..22: mol_type = other DNA
caccccttcttggccagtagtt

SEQ ID NO: 51515 - DNA, 22 bp, synthetic construct
  misc_feature 1..22: note = chemically synthesized
  source 1..22: mol_type = other DNA
cttggccagtagttgagggtaa

SEQ ID NO: 51516 - DNA, 22 bp, synthetic construct
  misc_feature 1..22: note = chemically synthesized
  source 1..22: mol_type = other DNA
ttggccagtagttgagggtaaa

SEQ ID NO: 51517 - DNA, 22 bp, synthetic construct
  misc_feature 1..22: note = chemically synthesized
  source 1..22: mol_type = other DNA
ggccagtagttgagggtaaatt

SEQ ID NO: 51518 - DNA, 22 bp, synthetic construct
  misc_feature 1..22: note = chemically synthesized
  source 1..22: mol_type = other DNA
gccagtagttgagggtaaatta

SEQ ID NO: 51519 - DNA, 22 bp, synthetic construct
  misc_feature 1..22: note = chemically synthesized
  source 1..22: mol_type = other DNA
agggtaaattaacgaaaagaat

SEQ ID NO: 51520 - DNA, 22 bp, synthetic construct
  misc_feature 1..22: note = chemically synthesized
  source 1..22: mol_type = other DNA
acgaaaagaattaatttgtctg

SEQ ID NO: 51521 - DNA, 22 bp, synthetic construct
  misc_feature 1..22: note = chemically synthesized
  source 1..22: mol_type = other DNA
atttgtctgtaactcttgtctg

SEQ ID NO: 51522 - DNA, 22 bp, synthetic construct
  misc_feature 1..22: note = chemically synthesized
  source 1..22: mol_type = other DNA
gtctgtaactcttgtctgttgc

SEQ ID NO: 51523 - DNA, 22 bp, synthetic construct
  misc_feature 1..22: note = chemically synthesized
  source 1..22: mol_type = other DNA
tctgtaactcttgtctgttgct

SEQ ID NO: 51524 - DNA, 22 bp, synthetic construct
  misc_feature 1..22: note = chemically synthesized
  source 1..22: mol_type = other DNA
taactcttgtctgttgctctct

SEQ ID NO: 51525 - DNA, 22 bp, synthetic construct
  misc_feature 1..22: note = chemically synthesized
  source 1..22: mol_type = other DNA
ttgtctgttgctctctgtttag

SEQ ID NO: 51526 - DNA, 22 bp, synthetic construct
  misc_feature 1..22: note = chemically synthesized
  source 1..22: mol_type = other DNA
gtctgttgctctctgtttagga

SEQ ID NO: 51527 - DNA, 22 bp, synthetic construct
  misc_feature 1..22: note = chemically synthesized
  source 1..22: mol_type = other DNA
tctgttgctctctgtttaggaa

SEQ ID NO: 51528 - DNA, 22 bp, synthetic construct
  misc_feature 1..22: note = chemically synthesized
  source 1..22: mol_type = other DNA
ttgctctctgtttaggaagaac

SEQ ID NO: 51529 - DNA, 22 bp, synthetic construct
  misc_feature 1..22: note = chemically synthesized
  source 1..22: mol_type = other DNA
ctctctgtttaggaagaactaa

SEQ ID NO: 51530 - DNA, 22 bp, synthetic construct
  misc_feature 1..22: note = chemically synthesized
  source 1..22: mol_type = other DNA
tctgtttaggaagaactaaaaa

SEQ ID NO: 51531 - DNA, 22 bp, synthetic construct
  misc_feature 1..22: note = chemically synthesized
  source 1..22: mol_type = other DNA
tgtttaggaagaactaaaaact

SEQ ID NO: 51532 - DNA, 22 bp, synthetic construct
  misc_feature 1..22: note = chemically synthesized
  source 1..22: mol_type = other DNA
tttaggaagaactaaaaactcc

SEQ ID NO: 51533 - DNA, 22 bp, synthetic construct
  misc_feature 1..22: note = chemically synthesized
  source 1..22: mol_type = other DNA
aggaagaactaaaaactccaca

SEQ ID NO: 51534 - DNA, 22 bp, synthetic construct
  misc_feature 1..22: note = chemically synthesized
  source 1..22: mol_type = other DNA
ggaagaactaaaaactccacaa

SEQ ID NO: 51535 - DNA, 22 bp, synthetic construct
  misc_feature 1..22: note = chemically synthesized
  source 1..22: mol_type = other DNA
aaaactccacaaattcaacagt

SEQ ID NO: 51536 - DNA, 22 bp, synthetic construct
  misc_feature 1..22: note = chemically synthesized
  source 1..22: mol_type = other DNA
cacaaattcaacagtctcccct

SEQ ID NO: 51537 - DNA, 22 bp, synthetic construct
  misc_feature 1..22: note = chemically synthesized
  source 1..22: mol_type = other DNA
aacagtctcccctctgtctcca

SEQ ID NO: 51538 - DNA, 22 bp, synthetic construct
  misc_feature 1..22: note = chemically synthesized
  source 1..22: mol_type = other DNA
ccctctgtctccactgaactat

SEQ ID NO: 51539 - DNA, 22 bp, synthetic construct
  misc_feature 1..22: note = chemically synthesized
  source 1..22: mol_type = other DNA
tgtctccactgaactatccctc

SEQ ID NO: 51540 - DNA, 22 bp, synthetic construct
  misc_feature 1..22: note = chemically synthesized
  source 1..22: mol_type = other DNA
tctccactgaactatccctcca

SEQ ID NO: 51541 - DNA, 22 bp, synthetic construct
  misc_feature 1..22: note = chemically synthesized
  source 1..22: mol_type = other DNA
cactgaactatccctccatttt

SEQ ID NO: 51542 - DNA, 22 bp, synthetic construct
  misc_feature 1..22: note = chemically synthesized
  source 1..22: mol_type = other DNA
aactatccctccattttcacca

SEQ ID NO: 51543 - DNA, 22 bp, synthetic construct
  misc_feature 1..22: note = chemically synthesized
  source 1..22: mol_type = other DNA
tccctccattttcaccacactt

SEQ ID NO: 51544 - DNA, 22 bp, synthetic construct
  misc_feature 1..22: note = chemically synthesized
  source 1..22: mol_type = other DNA
cattttcaccacactttttggc

SEQ ID NO: 51545 - DNA, 22 bp, synthetic construct
  misc_feature 1..22: note = chemically synthesized
  source 1..22: mol_type = other DNA
tcaccacactttttggctgcca

SEQ ID NO: 51546 - DNA, 22 bp, synthetic construct
  misc_feature 1..22: note = chemically synthesized
  source 1..22: mol_type = other DNA
caccacactttttggctgccat

SEQ ID NO: 51547 - DNA, 22 bp, synthetic construct
  misc_feature 1..22: note = chemically synthesized
  source 1..22: mol_type = other DNA
accacactttttggctgccatt

SEQ ID NO: 51548 - DNA, 22 bp, synthetic construct
  misc_feature 1..22: note = chemically synthesized
  source 1..22: mol_type = other DNA
tttggctgccattcacaaaaaa

SEQ ID NO: 51549 - DNA, 22 bp, synthetic construct
  misc_feature 1..22: note = chemically synthesized
  source 1..22: mol_type = other DNA
ttggctgccattcacaaaaaaa

SEQ ID NO: 51550 - DNA, 22 bp, synthetic construct
  misc_feature 1..22: note = chemically synthesized
  source 1..22: mol_type = other DNA
tggctgccattcacaaaaaaag

SEQ ID NO: 51551 - DNA, 22 bp, synthetic construct
  misc_feature 1..22: note = chemically synthesized
  source 1..22: mol_type = other DNA
ggctgccattcacaaaaaaagc

SEQ ID NO: 51552 - DNA, 22 bp, synthetic construct
  misc_feature 1..22: note = chemically synthesized
  source 1..22: mol_type = other DNA
gctgccattcacaaaaaaagct

SEQ ID NO: 51553 - DNA, 22 bp, synthetic construct
  misc_feature 1..22: note = chemically synthesized
  source 1..22: mol_type = other DNA
ccattcacaaaaaaagctgaag

SEQ ID NO: 51554 - DNA, 22 bp, synthetic construct
  misc_feature 1..22: note = chemically synthesized
  source 1..22: mol_type = other DNA
acaaaaaaagctgaagccagcc

SEQ ID NO: 51555 - DNA, 22 bp, synthetic construct
  misc_feature 1..22: note = chemically synthesized
  source 1..22: mol_type = other DNA
aagccagccatgggtaactatt

SEQ ID NO: 51556 - DNA, 22 bp, synthetic construct
  misc_feature 1..22: note = chemically synthesized
  source 1..22: mol_type = other DNA
ttaaaatccatgtggttgcaga

SEQ ID NO: 51557 - DNA, 22 bp, synthetic construct
  misc_feature 1..22: note = chemically synthesized
  source 1..22: mol_type = other DNA
aaatccatgtggttgcagagac

SEQ ID NO: 51558 - DNA, 22 bp, synthetic construct
  misc_feature 1..22: note = chemically synthesized
  source 1..22: mol_type = other DNA
cagagacagcatccctatcaca

SEQ ID NO: 51559 - DNA, 22 bp, synthetic construct
  misc_feature 1..22: note = chemically synthesized
  source 1..22: mol_type = other DNA
tcacatgagcttttgccctgtc

SEQ ID NO: 51560 - DNA, 22 bp, synthetic construct
  misc_feature 1..22: note = chemically synthesized
  source 1..22: mol_type = other DNA
ttgccctgtccccaaggccctc

SEQ ID NO: 51561 - DNA, 22 bp, synthetic construct
  misc_feature 1..22: note = chemically synthesized
  source 1..22: mol_type = other DNA
tgccctgtccccaaggccctct

SEQ ID NO: 51562 - DNA, 22 bp, synthetic construct
  misc_feature 1..22: note = chemically synthesized
  source 1..22: mol_type = other DNA
gccctgtccccaaggccctctg

SEQ ID NO: 51563 - DNA, 22 bp, synthetic construct
  misc_feature 1..22: note = chemically synthesized
  source 1..22: mol_type = other DNA
ccctgtccccaaggccctctgt

SEQ ID NO: 51564 - DNA, 22 bp, synthetic construct
  misc_feature 1..22: note = chemically synthesized
  source 1..22: mol_type = other DNA
tccccaaggccctctgtcatct

SEQ ID NO: 51565 - DNA, 22 bp, synthetic construct
  misc_feature 1..22: note = chemically synthesized
  source 1..22: mol_type = other DNA
tgtcatctccactccttgtggg

SEQ ID NO: 51566 - DNA, 22 bp, synthetic construct
  misc_feature 1..22: note = chemically synthesized
  source 1..22: mol_type = other DNA
tcatctccactccttgtgggcc

SEQ ID NO: 51567 - DNA, 22 bp, synthetic construct
  misc_feature 1..22: note = chemically synthesized
  source 1..22: mol_type = other DNA
cactccttgtgggccaccacag

SEQ ID NO: 51568 - DNA, 22 bp, synthetic construct
  misc_feature 1..22: note = chemically synthesized
  source 1..22: mol_type = other DNA
cttgtgggccaccacagcaagg

SEQ ID NO: 51569 - DNA, 22 bp, synthetic construct
  misc_feature 1..22: note = chemically synthesized
  source 1..22: mol_type = other DNA
gtgggccaccacagcaaggctg

SEQ ID NO: 51570 - DNA, 22 bp, synthetic construct
  misc_feature 1..22: note = chemically synthesized
  source 1..22: mol_type = other DNA
tgggccaccacagcaaggctga

SEQ ID NO: 51571 - DNA, 22 bp, synthetic construct
  misc_feature 1..22: note = chemically synthesized
  source 1..22: mol_type = other DNA
actcactggctctgaagaagat

SEQ ID NO: 51572 - DNA, 22 bp, synthetic construct
  misc_feature 1..22: note = chemically synthesized
  source 1..22: mol_type = other DNA
actggctctgaagaagatccac

SEQ ID NO: 51573 - DNA, 22 bp, synthetic construct
  misc_feature 1..22: note = chemically synthesized
  source 1..22: mol_type = other DNA
gctctgaagaagatccacaaag

SEQ ID NO: 51574 - DNA, 22 bp, synthetic construct
  misc_feature 1..22: note = chemically synthesized
  source 1..22: mol_type = other DNA
tgaagaagatccacaaagcctg

SEQ ID NO: 51575 - DNA, 22 bp, synthetic construct
  misc_feature 1..22: note = chemically synthesized
  source 1..22: mol_type = other DNA
aagaagatccacaaagcctgtg

SEQ ID NO: 51576 - DNA, 22 bp, synthetic construct
  misc_feature 1..22: note = chemically synthesized
  source 1..22: mol_type = other DNA
tggagaggaggcccacagctct

SEQ ID NO: 51577 - DNA, 22 bp, synthetic construct
  misc_feature 1..22: note = chemically synthesized
  source 1..22: mol_type = other DNA
tccaggatgcatgaggaggggc

SEQ ID NO: 51578 - DNA, 22 bp, synthetic construct
  misc_feature 1..22: note = chemically synthesized
  source 1..22: mol_type = other DNA
caggatgcatgaggaggggcca

SEQ ID NO: 51579 - DNA, 22 bp, synthetic construct
  misc_feature 1..22: note = chemically synthesized
  source 1..22: mol_type = other DNA
tccctcttggcccatgggaaat

SEQ ID NO: 51580 - DNA, 22 bp, synthetic construct
  misc_feature 1..22: note = chemically synthesized
  source 1..22: mol_type = other DNA
ccctcttggcccatgggaaatc

SEQ ID NO: 51581 - DNA, 22 bp, synthetic construct
  misc_feature 1..22: note = chemically synthesized
  source 1..22: mol_type = other DNA
cctcttggcccatgggaaatcc

SEQ ID NO: 51582 - DNA, 22 bp, synthetic construct
  misc_feature 1..22: note = chemically synthesized
  source 1..22: mol_type = other DNA
ttggcccatgggaaatcctagg

SEQ ID NO: 51583 - DNA, 22 bp, synthetic construct
  misc_feature 1..22: note = chemically synthesized
  source 1..22: mol_type = other DNA
ggcccatgggaaatcctaggag

SEQ ID NO: 51584 - DNA, 22 bp, synthetic construct
  misc_feature 1..22: note = chemically synthesized
  source 1..22: mol_type = other DNA
gcccatgggaaatcctaggagg

SEQ ID NO: 51585 - DNA, 22 bp, synthetic construct
  misc_feature 1..22: note = chemically synthesized
  source 1..22: mol_type = other DNA
ggaggcaacataagcctgtggc

SEQ ID NO: 51586 - DNA, 22 bp, synthetic construct
  misc_feature 1..22: note = chemically synthesized
  source 1..22: mol_type = other DNA
tggcagcccctccacaaagccc

SEQ ID NO: 51587 - DNA, 22 bp, synthetic construct
  misc_feature 1..22: note = chemically synthesized
  source 1..22: mol_type = other DNA
cacaaagccctgcctccagagt

SEQ ID NO: 51588 - DNA, 22 bp, synthetic construct
  misc_feature 1..22: note = chemically synthesized
  source 1..22: mol_type = other DNA
cctccagagttcccataggcga

SEQ ID NO: 51589 - DNA, 22 bp, synthetic construct
  misc_feature 1..22: note = chemically synthesized
  source 1..22: mol_type = other DNA
cagagttcccataggcgagaat

SEQ ID NO: 51590 - DNA, 22 bp, synthetic construct
  misc_feature 1..22: note = chemically synthesized
  source 1..22: mol_type = other DNA
ccataggcgagaatgtgtcctc

SEQ ID NO: 51591 - DNA, 22 bp, synthetic construct
  misc_feature 1..22: note = chemically synthesized
  source 1..22: mol_type = other DNA
agtggagcattaccttgcacag

SEQ ID NO: 51592 - DNA, 22 bp, synthetic construct
  misc_feature 1..22: note = chemically synthesized
  source 1..22: mol_type = other DNA
ccttgcacagcctgtgaagtgc

SEQ ID NO: 51593 - DNA, 22 bp, synthetic construct
  misc_feature 1..22: note = chemically synthesized
  source 1..22: mol_type = other DNA
gcacagcctgtgaagtgctctg

SEQ ID NO: 51594 - DNA, 22 bp, synthetic construct
  misc_feature 1..22: note = chemically synthesized
  source 1..22: mol_type = other DNA
cacagcctgtgaagtgctctgt

SEQ ID NO: 51595 - DNA, 22 bp, synthetic construct
  misc_feature 1..22: note = chemically synthesized
  source 1..22: mol_type = other DNA
tgaagtgctctgtgcggggata

SEQ ID NO: 51596 - DNA, 22 bp, synthetic construct
  misc_feature 1..22: note = chemically synthesized
  source 1..22: mol_type = other DNA
tgtgcggggataaaggcaagta

SEQ ID NO: 51597 - DNA, 22 bp, synthetic construct
  misc_feature 1..22: note = chemically synthesized
  source 1..22: mol_type = other DNA
tgcggggataaaggcaagtaac

SEQ ID NO: 51598 - DNA, 22 bp, synthetic construct
  misc_feature 1..22: note = chemically synthesized
  source 1..22: mol_type = other DNA
tctcaaggaattgctagcttat

SEQ ID NO: 51599 - DNA, 22 bp, synthetic construct
  misc_feature 1..22: note = chemically synthesized
  source 1..22: mol_type = other DNA
tcaaggaattgctagcttatgg

SEQ ID NO: 51600 - DNA, 22 bp, synthetic construct
  misc_feature 1..22: note = chemically synthesized
  source 1..22: mol_type = other DNA
aaggaattgctagcttatgggg

SEQ ID NO: 51601 - DNA, 22 bp, synthetic construct
  misc_feature 1..22: note = chemically synthesized
  source 1..22: mol_type = other DNA
ctagcttatggggagagaaaac

SEQ ID NO: 51602 - DNA, 22 bp, synthetic construct
  misc_feature 1..22: note = chemically synthesized
  source 1..22: mol_type = other DNA
gcttatggggagagaaaactaa

SEQ ID NO: 51603 - DNA, 22 bp, synthetic construct
  misc_feature 1..22: note = chemically synthesized
  source 1..22: mol_type = other DNA
atggggagagaaaactaaacgt

SEQ ID NO: 51604 - DNA, 22 bp, synthetic construct
  misc_feature 1..22: note = chemically synthesized
  source 1..22: mol_type = other DNA
tggggagagaaaactaaacgtg

SEQ ID NO: 51605 - DNA, 22 bp, synthetic construct
  misc_feature 1..22: note = chemically synthesized
  source 1..22: mol_type = other DNA
aacgtggaagccccaacagtgt

SEQ ID NO: 51606 - DNA, 22 bp, synthetic construct
  misc_feature 1..22: note = chemically synthesized
  source 1..22: mol_type = other DNA
gagtatgaagggggccccacct

SEQ ID NO: 51607 - DNA, 22 bp, synthetic construct
  misc_feature 1..22: note = chemically synthesized
  source 1..22: mol_type = other DNA
aggaggtcggggagtgtggcgt

SEQ ID NO: 51608 - DNA, 22 bp, synthetic construct
  misc_feature 1..22: note = chemically synthesized
  source 1..22: mol_type = other DNA
ccccatagcaggatgtgtgcaa

SEQ ID NO: 51609 - DNA, 22 bp, synthetic construct
  misc_feature 1..22: note = chemically synthesized
  source 1..22: mol_type = other DNA
ccactggtactcagcatctgcc

SEQ ID NO: 51610 - DNA, 22 bp, synthetic construct
  misc_feature 1..22: note = chemically synthesized
  source 1..22: mol_type = other DNA
gtactcagcatctgccacctcg

SEQ ID NO: 51611 - DNA, 22 bp, synthetic construct
  misc_feature 1..22: note = chemically synthesized
  source 1..22: mol_type = other DNA
agcatctgccacctcgctgacc

SEQ ID NO: 51612 - DNA, 22 bp, synthetic construct
  misc_feature 1..22: note = chemically synthesized
  source 1..22: mol_type = other DNA
ccacctcgctgaccctcatttg

SEQ ID NO: 51613 - DNA, 22 bp, synthetic construct
  misc_feature 1..22: note = chemically synthesized
  source 1..22: mol_type = other DNA
gctgaccctcatttgaccctcc

SEQ ID NO: 51614 - DNA, 22 bp, synthetic construct
  misc_feature 1..22: note = chemically synthesized
  source 1..22: mol_type = other DNA
accctcatttgaccctcccagg

SEQ ID NO: 51615 - DNA, 22 bp, synthetic construct
  misc_feature 1..22: note = chemically synthesized
  source 1..22: mol_type = other DNA
atttgaccctcccaggcaagtg

SEQ ID NO: 51616 - DNA, 22 bp, synthetic construct
  misc_feature 1..22: note = chemically synthesized
  source 1..22: mol_type = other DNA
gaccctcccaggcaagtgctgt

SEQ ID NO: 51617 - DNA, 22 bp, synthetic construct
  misc_feature 1..22: note = chemically synthesized
  source 1..22: mol_type = other DNA
accctcccaggcaagtgctgtg

SEQ ID NO: 51618 - DNA, 22 bp, synthetic construct
  misc_feature 1..22: note = chemically synthesized
  source 1..22: mol_type = other DNA
ccaggcaagtgctgtgatgacc

SEQ ID NO: 51619 - DNA, 22 bp, synthetic construct
  misc_feature 1..22: note = chemically synthesized
  source 1..22: mol_type = other DNA
tgatgaccccctccctggtgag

SEQ ID NO: 51620 - DNA, 22 bp, synthetic construct
  misc_feature 1..22: note = chemically synthesized
  source 1..22: mol_type = other DNA
cctggtgaggagccggccagga

SEQ ID NO: 51621 - DNA, 22 bp, synthetic construct
  misc_feature 1..22: note = chemically synthesized
  source 1..22: mol_type = other DNA
gtgaggagccggccaggacttg

SEQ ID NO: 51622 - DNA, 22 bp, synthetic construct
  misc_feature 1..22: note = chemically synthesized
  source 1..22: mol_type = other DNA
ggatccaagaagtctggcttca

SEQ ID NO: 51623 - DNA, 22 bp, synthetic construct
  misc_feature 1..22: note = chemically synthesized
  source 1..22: mol_type = other DNA
gatccaagaagtctggcttcaa

SEQ ID NO: 51624 - DNA, 22 bp, synthetic construct
  misc_feature 1..22: note = chemically synthesized
  source 1..22: mol_type = other DNA
gcttcaaaccccatgctctgac

SEQ ID NO: 51625 - DNA, 22 bp, synthetic construct
  misc_feature 1..22: note = chemically synthesized
  source 1..22: mol_type = other DNA
caaaccccatgctctgaccgct

SEQ ID NO: 51626 - DNA, 22 bp, synthetic construct
  misc_feature 1..22: note = chemically synthesized
  source 1..22: mol_type = other DNA
aaaccccatgctctgaccgctc

SEQ ID NO: 51627 - DNA, 22 bp, synthetic construct
  misc_feature 1..22: note = chemically synthesized
  source 1..22: mol_type = other DNA
tgaccgctcgatggcaccgctt

SEQ ID NO: 51628 - DNA, 22 bp, synthetic construct
  misc_feature 1..22: note = chemically synthesized
  source 1..22: mol_type = other DNA
accgctcgatggcaccgcttcc

SEQ ID NO: 51629 - DNA, 22 bp, synthetic construct
  misc_feature 1..22: note = chemically synthesized
  source 1..22: mol_type = other DNA
gatggcaccgcttccttggcag

SEQ ID NO: 51630 - DNA, 22 bp, synthetic construct
  misc_feature 1..22: note = chemically synthesized
  source 1..22: mol_type = other DNA
ccttggcaggacatctacagct

SEQ ID NO: 51631 - DNA, 22 bp, synthetic construct
  misc_feature 1..22: note = chemically synthesized
  source 1..22: mol_type = other DNA
cttggcaggacatctacagctc

SEQ ID NO: 51632 - DNA, 22 bp, synthetic construct
  misc_feature 1..22: note = chemically synthesized
  source 1..22: mol_type = other DNA
ggcaggacatctacagctccca

SEQ ID NO: 51633 - DNA, 22 bp, synthetic construct
  misc_feature 1..22: note = chemically synthesized
  source 1..22: mol_type = other DNA
gcaggacatctacagctcccag

SEQ ID NO: 51634 - DNA, 22 bp, synthetic construct
  misc_feature 1..22: note = chemically synthesized
  source 1..22: mol_type = other DNA
cagctcccagggcacccagggg

SEQ ID NO: 51635 - DNA, 22 bp, synthetic construct
  misc_feature 1..22: note = chemically synthesized
  source 1..22: mol_type = other DNA
ccagggcacccaggggacatca

SEQ ID NO: 51636 - DNA, 22 bp, synthetic construct
  misc_feature 1..22: note = chemically synthesized
  source 1..22: mol_type = other DNA
tgaaaggggaatggtcagaccc

SEQ ID NO: 51637 - DNA, 22 bp, synthetic construct
  misc_feature 1..22: note = chemically synthesized
  source 1..22: mol_type = other DNA
aaaggggaatggtcagacccgg

SEQ ID NO: 51638 - DNA, 22 bp, synthetic construct
  misc_feature 1..22: note = chemically synthesized
  source 1..22: mol_type = other DNA
gaatgccatgctaaggagttcg

SEQ ID NO: 51639 - DNA, 22 bp, synthetic construct
  misc_feature 1..22: note = chemically synthesized
  source 1..22: mol_type = other DNA
aatgccatgctaaggagttcgg

SEQ ID NO: 51640 - DNA, 22 bp, synthetic construct
  misc_feature 1..22: note = chemically synthesized
  source 1..22: mol_type = other DNA
aggagttcggacttgacaagag

SEQ ID NO: 51641 - DNA, 22 bp, synthetic construct
  misc_feature 1..22: note = chemically synthesized
  source 1..22: mol_type = other DNA
ggacttgacaagaggcagcagc

SEQ ID NO: 51642 - DNA, 22 bp, synthetic construct
  misc_feature 1..22: note = chemically synthesized
  source 1..22: mol_type = other DNA
gacaagaggcagcagcaaaggg

SEQ ID NO: 51643 - DNA, 22 bp, synthetic construct
  misc_feature 1..22: note = chemically synthesized
  source 1..22: mol_type = other DNA
acaagaggcagcagcaaagggt

SEQ ID NO: 51644 - DNA, 22 bp, synthetic construct
  misc_feature 1..22: note = chemically synthesized
  source 1..22: mol_type = other DNA
tgataacctggttagacgtgct

SEQ ID NO: 51645 - DNA, 22 bp, synthetic construct
  misc_feature 1..22: note = chemically synthesized
  source 1..22: mol_type = other DNA
gataacctggttagacgtgctc

SEQ ID NO: 51646 - DNA, 22 bp, synthetic construct
  misc_feature 1..22: note = chemically synthesized
  source 1..22: mol_type = other DNA
ataacctggttagacgtgctct

SEQ ID NO: 51647 - DNA, 22 bp, synthetic construct
  misc_feature 1..22: note = chemically synthesized
  source 1..22: mol_type = other DNA
gttagacgtgctctgatttatt

SEQ ID NO: 51648 - DNA, 22 bp, synthetic construct
  misc_feature 1..22: note = chemically synthesized
  source 1..22: mol_type = other DNA
gacgtgctctgatttattgtat

SEQ ID NO: 51649 - DNA, 22 bp, synthetic construct
  misc_feature 1..22: note = chemically synthesized
  source 1..22: mol_type = other DNA
tgatttattgtatttcactgct

SEQ ID NO: 51650 - DNA, 22 bp, synthetic construct
  misc_feature 1..22: note = chemically synthesized
  source 1..22: mol_type = other DNA
atttattgtatttcactgctgc

SEQ ID NO: 51651 - DNA, 22 bp, synthetic construct
  misc_feature 1..22: note = chemically synthesized
  source 1..22: mol_type = other DNA
attgtatttcactgctgcaaga

SEQ ID NO: 51652 - DNA, 22 bp, synthetic construct
  misc_feature 1..22: note = chemically synthesized
  source 1..22: mol_type = other DNA
ttgtatttcactgctgcaagat

SEQ ID NO: 51653 - DNA, 22 bp, synthetic construct
  misc_feature 1..22: note = chemically synthesized
  source 1..22: mol_type = other DNA
tatttcactgctgcaagattta

SEQ ID NO: 51654 - DNA, 22 bp, synthetic construct
  misc_feature 1..22: note = chemically synthesized
  source 1..22: mol_type = other DNA
cactgctgcaagatttactgga

SEQ ID NO: 51655 - DNA, 22 bp, synthetic construct
  misc_feature 1..22: note = chemically synthesized
  source 1..22: mol_type = other DNA
actgctgcaagatttactggac

SEQ ID NO: 51656 - DNA, 22 bp, synthetic construct
  misc_feature 1..22: note = chemically synthesized
  source 1..22: mol_type = other DNA
ctgcaagatttactggacaaag

SEQ ID NO: 51657 - DNA, 22 bp, synthetic construct
  misc_feature 1..22: note = chemically synthesized
  source 1..22: mol_type = other DNA
caagatttactggacaaagagg

SEQ ID NO: 51658 - DNA, 22 bp, synthetic construct
  misc_feature 1..22: note = chemically synthesized
  source 1..22: mol_type = other DNA
actggacaaagaggaggagggg

SEQ ID NO: 51659 - DNA, 22 bp, synthetic construct
  misc_feature 1..22: note = chemically synthesized
  source 1..22: mol_type = other DNA
ctggacaaagaggaggaggggg

SEQ ID NO: 51660 - DNA, 22 bp, synthetic construct
  misc_feature 1..22: note = chemically synthesized
  source 1..22: mol_type = other DNA
gacaaagaggaggagggggaga

SEQ ID NO: 51661 - DNA, 22 bp, synthetic construct
  misc_feature 1..22: note = chemically synthesized
  source 1..22: mol_type = other DNA
gaagcccaagcaaaggccaggg

SEQ ID NO: 51662 - DNA, 22 bp, synthetic construct
  misc_feature 1..22: note = chemically synthesized
  source 1..22: mol_type = other DNA
ccagcctgagcgcggagtgcat

SEQ ID NO: 51663 - DNA, 22 bp, synthetic construct
  misc_feature 1..22: note = chemically synthesized
  source 1..22: mol_type = other DNA
cagcctgagcgcggagtgcatg

SEQ ID NO: 51664 - DNA, 22 bp, synthetic construct
  misc_feature 1..22: note = chemically synthesized
  source 1..22: mol_type = other DNA
agcgcggagtgcatgcaggctg

SEQ ID NO: 51665 - DNA, 22 bp, synthetic construct
  misc_feature 1..22: note = chemically synthesized
  source 1..22: mol_type = other DNA
cgcggtggccgcccgggttgca

SEQ ID NO: 51666 - DNA, 22 bp, synthetic construct
  misc_feature 1..22: note = chemically synthesized
  source 1..22: mol_type = other DNA
cagggaacgcgcgggccagcga

SEQ ID NO: 51667 - DNA, 22 bp, synthetic construct
  misc_feature 1..22: note = chemically synthesized
  source 1..22: mol_type = other DNA
tgcggtgctaccccgtgcccgc

SEQ ID NO: 51668 - DNA, 22 bp, synthetic construct
  misc_feature 1..22: note = chemically synthesized
  source 1..22: mol_type = other DNA
cggtgctaccccgtgcccgcac

SEQ ID NO: 51669 - DNA, 22 bp, synthetic construct
  misc_feature 1..22: note = chemically synthesized
  source 1..22: mol_type = other DNA
ccccgtgcccgcactcacccag

SEQ ID NO: 51670 - DNA, 22 bp, synthetic construct
  misc_feature 1..22: note = chemically synthesized
  source 1..22: mol_type = other DNA
acccaggacggcgcagaccagc

SEQ ID NO: 51671 - DNA, 22 bp, synthetic construct
  misc_feature 1..22: note = chemically synthesized
  source 1..22: mol_type = other DNA
ccacggcgagcctcatcttccg

SEQ ID NO: 51672 - DNA, 22 bp, synthetic construct
  misc_feature 1..22: note = chemically synthesized
  source 1..22: mol_type = other DNA
atcttccgggtgcggcgctgag

SEQ ID NO: 51673 - DNA, 22 bp, synthetic construct
  misc_feature 1..22: note = chemically synthesized
  source 1..22: mol_type = other DNA
ccgggtgcggcgctgagcagcg

SEQ ID NO: 51674 - DNA, 22 bp, synthetic construct
  misc_feature 1..22: note = chemically synthesized
  source 1..22: mol_type = other DNA
cgggtgcggcgctgagcagcga

SEQ ID NO: 51675 - DNA, 22 bp, synthetic construct
  misc_feature 1..22: note = chemically synthesized
  source 1..22: mol_type = other DNA
agcagcgagcacagtcggactc

SEQ ID NO: 51676 - DNA, 22 bp, synthetic construct
  misc_feature 1..22: note = chemically synthesized
  source 1..22: mol_type = other DNA
gcttctgtgcagcctccggcgc

SEQ ID NO: 51677 - DNA, 22 bp, synthetic construct
  misc_feature 1..22: note = chemically synthesized
  source 1..22: mol_type = other DNA
ctgtgcagcctccggcgccccg

SEQ ID NO: 51678 - DNA, 22 bp, synthetic construct
  misc_feature 1..22: note = chemically synthesized
  source 1..22: mol_type = other DNA
tgtgcagcctccggcgccccgc

SEQ ID NO: 51679 - DNA, 22 bp, synthetic construct
  misc_feature 1..22: note = chemically synthesized
  source 1..22: mol_type = other DNA
tgcagcctccggcgccccgcgt

SEQ ID NO: 51680 - DNA, 22 bp, synthetic construct
  misc_feature 1..22: note = chemically synthesized
  source 1..22: mol_type = other DNA
cggcgccccgcgtccctttatt

SEQ ID NO: 51681 - DNA, 22 bp, synthetic construct
  misc_feature 1..22: note = chemically synthesized
  source 1..22: mol_type = other DNA
tattccattcccggcctgggcg

SEQ ID NO: 51682 - DNA, 22 bp, synthetic construct
  misc_feature 1..22: note = chemically synthesized
  source 1..22: mol_type = other DNA
attccattcccggcctgggcgg

SEQ ID NO: 51683 - DNA, 22 bp, synthetic construct
  misc_feature 1..22: note = chemically synthesized
  source 1..22: mol_type = other DNA
ttccattcccggcctgggcggg

SEQ ID NO: 51684 - DNA, 22 bp, synthetic construct
  misc_feature 1..22: note = chemically synthesized
  source 1..22: mol_type = other DNA
cattcccggcctgggcgggctg

SEQ ID NO: 51685 - DNA, 22 bp, synthetic construct
  misc_feature 1..22: note = chemically synthesized
  source 1..22: mol_type = other DNA
ccggcctgggcgggctgggcgc

SEQ ID NO: 51686 - DNA, 22 bp, synthetic construct
  misc_feature 1..22: note = chemically synthesized
  source 1..22: mol_type = other DNA
ggcgggctgggcgcaatctttg

SEQ ID NO: 51687 - DNA, 22 bp, synthetic construct
  misc_feature 1..22: note = chemically synthesized
  source 1..22: mol_type = other DNA
ggcgcaatctttgacctcccgt

SEQ ID NO: 51688 - DNA, 22 bp, synthetic construct
  misc_feature 1..22: note = chemically synthesized
  source 1..22: mol_type = other DNA
tgacctcccgtgtttgtgcagc

SEQ ID NO: 51689 - DNA, 22 bp, synthetic construct
  misc_feature 1..22: note = chemically synthesized
  source 1..22: mol_type = other DNA
gacctcccgtgtttgtgcagcc

SEQ ID NO: 51690 - DNA, 22 bp, synthetic construct
  misc_feature 1..22: note = chemically synthesized
  source 1..22: mol_type = other DNA
acctcccgtgtttgtgcagccg

SEQ ID NO: 51691 - DNA, 22 bp, synthetic construct
  misc_feature 1..22: note = chemically synthesized
  source 1..22: mol_type = other DNA
ccgtgtttgtgcagccgggttg

SEQ ID NO: 51692 - DNA, 22 bp, synthetic construct
  misc_feature 1..22: note = chemically synthesized
  source 1..22: mol_type = other DNA
gtgcagccgggttgcccaatcg

SEQ ID NO: 51693 - DNA, 22 bp, synthetic construct
  misc_feature 1..22: note = chemically synthesized
  source 1..22: mol_type = other DNA
tgcagccgggttgcccaatcgc

SEQ ID NO: 51694 - DNA, 22 bp, synthetic construct
  misc_feature 1..22: note = chemically synthesized
  source 1..22: mol_type = other DNA
cccaatcgcccctctcccaacc

SEQ ID NO: 51695 - DNA, 22 bp, synthetic construct
  misc_feature 1..22: note = chemically synthesized
  source 1..22: mol_type = other DNA
tcccaaccccccttccttactc

SEQ ID NO: 51696 - DNA, 22 bp, synthetic construct
  misc_feature 1..22: note = chemically synthesized
  source 1..22: mol_type = other DNA
ccaaccccccttccttactcgt

SEQ ID NO: 51697 - DNA, 22 bp, synthetic construct
  misc_feature 1..22: note = chemically synthesized
  source 1..22: mol_type = other DNA
ccttactcgtcccactgatcac

SEQ ID NO: 51698 - DNA, 22 bp, synthetic construct
  misc_feature 1..22: note = chemically synthesized
  source 1..22: mol_type = other DNA
cttactcgtcccactgatcacc

SEQ ID NO: 51699 - DNA, 22 bp, synthetic construct
  misc_feature 1..22: note = chemically synthesized
  source 1..22: mol_type = other DNA
actcgtcccactgatcacctca

SEQ ID NO: 51700 - DNA, 22 bp, synthetic construct
  misc_feature 1..22: note = chemically synthesized
  source 1..22: mol_type = other DNA
ctcgtcccactgatcacctcat

SEQ ID NO: 51701 - DNA, 22 bp, synthetic construct
  misc_feature 1..22: note = chemically synthesized
  source 1..22: mol_type = other DNA
gtcccactgatcacctcatttt

SEQ ID NO: 51702 - DNA, 22 bp, synthetic construct
  misc_feature 1..22: note = chemically synthesized
  source 1..22: mol_type = other DNA
atcacctcattttctgagctct

SEQ ID NO: 51703 - DNA, 22 bp, synthetic construct
  misc_feature 1..22: note = chemically synthesized
  source 1..22: mol_type = other DNA
attttctgagctctggagacga

SEQ ID NO: 51704 - DNA, 22 bp, synthetic construct
  misc_feature 1..22: note = chemically synthesized
  source 1..22: mol_type = other DNA
tctgagctctggagacgacccg

SEQ ID NO: 51705 - DNA, 22 bp, synthetic construct
  misc_feature 1..22: note = chemically synthesized
  source 1..22: mol_type = other DNA
ctgagctctggagacgacccgc

SEQ ID NO: 51706 - DNA, 22 bp, synthetic construct
  misc_feature 1..22: note = chemically synthesized
  source 1..22: mol_type = other DNA
tgagctctggagacgacccgcg

SEQ ID NO: 51707 - DNA, 22 bp, synthetic construct
  misc_feature 1..22: note = chemically synthesized
  source 1..22: mol_type = other DNA
agctctggagacgacccgcgag

SEQ ID NO: 51708 - DNA, 22 bp, synthetic construct
  misc_feature 1..22: note = chemically synthesized
  source 1..22: mol_type = other DNA
tggagacgacccgcgagtggaa

SEQ ID NO: 51709 - DNA, 22 bp, synthetic construct
  misc_feature 1..22: note = chemically synthesized
  source 1..22: mol_type = other DNA
gagacgacccgcgagtggaagg

SEQ ID NO: 51710 - DNA, 22 bp, synthetic construct
  misc_feature 1..22: note = chemically synthesized
  source 1..22: mol_type = other DNA
atgggaagggacatgaagcaca

SEQ ID NO: 51711 - DNA, 22 bp, synthetic construct
  misc_feature 1..22: note = chemically synthesized
  source 1..22: mol_type = other DNA
tcatcgcggctcgctcggtgcc

SEQ ID NO: 51712 - DNA, 20 bp, synthetic construct
  misc_feature 1..20: note = chemically synthesized
  source 1..20: mol_type = other DNA
actaagtcaataatcagaat

SEQ ID NO: 51713 - DNA, 20 bp, synthetic construct
  misc_feature 1..20: note = chemically synthesized
  source 1..20: mol_type = other DNA
aagtcaataatcagaatcag

SEQ ID NO: 51714 - DNA, 20 bp, synthetic construct
  misc_feature 1..20: note = chemically synthesized
  source 1..20: mol_type = other DNA
agtcaataatcagaatcagc

SEQ ID NO: 51715 - DNA, 20 bp, synthetic construct
  misc_feature 1..20: note = chemically synthesized
  source 1..20: mol_type = other DNA
aatcagaatcagcaggtttg

SEQ ID NO: 51716 - DNA, 20 bp, synthetic construct
  misc_feature 1..20: note = chemically synthesized
  source 1..20: mol_type = other DNA
agaatcagcaggtttgcagt

SEQ ID NO: 51717 - DNA, 20 bp, synthetic construct
  misc_feature 1..20: note = chemically synthesized
  source 1..20: mol_type = other DNA
cagcaggtttgcagtcagat

SEQ ID NO: 51718 - DNA, 20 bp, synthetic construct
  misc_feature 1..20: note = chemically synthesized
  source 1..20: mol_type = other DNA
caggtttgcagtcagattgg

SEQ ID NO: 51719 - DNA, 20 bp, synthetic construct
  misc_feature 1..20: note = chemically synthesized
  source 1..20: mol_type = other DNA
aggtttgcagtcagattggc

SEQ ID NO: 51720 - DNA, 20 bp, synthetic construct
  misc_feature 1..20: note = chemically synthesized
  source 1..20: mol_type = other DNA
ggtttgcagtcagattggca

SEQ ID NO: 51721 - DNA, 20 bp, synthetic construct
  misc_feature 1..20: note = chemically synthesized
  source 1..20: mol_type = other DNA
gcagtcagattggcagggat

SEQ ID NO: 51722 - DNA, 20 bp, synthetic construct
  misc_feature 1..20: note = chemically synthesized
  source 1..20: mol_type = other DNA
gtcagattggcagggataag

SEQ ID NO: 51723 - DNA, 20 bp, synthetic construct
  misc_feature 1..20: note = chemically synthesized
  source 1..20: mol_type = other DNA
attggcagggataagcagcc

SEQ ID NO: 51724 - DNA, 20 bp, synthetic construct
  misc_feature 1..20: note = chemically synthesized
  source 1..20: mol_type = other DNA
cagggataagcagcctagct

SEQ ID NO: 51725 - DNA, 20 bp, synthetic construct
  misc_feature 1..20: note = chemically synthesized
  source 1..20: mol_type = other DNA
agggataagcagcctagctc

SEQ ID NO: 51726 - DNA, 20 bp, synthetic construct
  misc_feature 1..20: note = chemically synthesized
  source 1..20: mol_type = other DNA
ggataagcagcctagctcag

SEQ ID NO: 51727 - DNA, 20 bp, synthetic construct
  misc_feature 1..20: note = chemically synthesized
  source 1..20: mol_type = other DNA
taagcagcctagctcaggag

SEQ ID NO: 51728 - DNA, 20 bp, synthetic construct
  misc_feature 1..20: note = chemically synthesized
  source 1..20: mol_type = other DNA
cagcctagctcaggagaagt

SEQ ID NO: 51729 - DNA, 20 bp, synthetic construct
  misc_feature 1..20: note = chemically synthesized
  source 1..20: mol_type = other DNA
ctcaggagaagtgagtataa

SEQ ID NO: 51730 - DNA, 20 bp, synthetic construct
  misc_feature 1..20: note = chemically synthesized
  source 1..20: mol_type = other DNA
agaagtgagtataaaagccc

SEQ ID NO: 51731 - DNA, 20 bp, synthetic construct
  misc_feature 1..20: note = chemically synthesized
  source 1..20: mol_type = other DNA
gaagtgagtataaaagcccc

SEQ ID NO: 51732 - DNA, 20 bp, synthetic construct
  misc_feature 1..20: note = chemically synthesized
  source 1..20: mol_type = other DNA
tgagtataaaagccccaggc

SEQ ID NO: 51733 - DNA, 20 bp, synthetic construct
  misc_feature 1..20: note = chemically synthesized
  source 1..20: mol_type = other DNA
gagtataaaagccccaggct

SEQ ID NO: 51734 - DNA, 20 bp, synthetic construct
  misc_feature 1..20: note = chemically synthesized
  source 1..20: mol_type = other DNA
gtataaaagccccaggctgg

SEQ ID NO: 51735 - DNA, 20 bp, synthetic construct
  misc_feature 1..20: note = chemically synthesized
  source 1..20: mol_type = other DNA
taaaagccccaggctgggag

SEQ ID NO: 51736 - DNA, 20 bp, synthetic construct
  misc_feature 1..20: note = chemically synthesized
  source 1..20: mol_type = other DNA
caggctgggagcagccatca

SEQ ID NO: 51737 - DNA, 20 bp, synthetic construct
  misc_feature 1..20: note = chemically synthesized
  source 1..20: mol_type = other DNA
gctgggagcagccatcacag

SEQ ID NO: 51738 - DNA, 20 bp, synthetic construct
  misc_feature 1..20: note = chemically synthesized
  source 1..20: mol_type = other DNA
cacagaagtccactcattct

SEQ ID NO: 51739 - DNA, 20 bp, synthetic construct
  misc_feature 1..20: note = chemically synthesized
  source 1..20: mol_type = other DNA
agaagtccactcattcttgg

SEQ ID NO: 51740 - DNA, 20 bp, synthetic construct
  misc_feature 1..20: note = chemically synthesized
  source 1..20: mol_type = other DNA
gaagtccactcattcttggc

SEQ ID NO: 51741 - DNA, 20 bp, synthetic construct
  misc_feature 1..20: note = chemically synthesized
  source 1..20: mol_type = other DNA
tccactcattcttggcagga

SEQ ID NO: 51742 - DNA, 20 bp, synthetic construct
  misc_feature 1..20: note = chemically synthesized
  source 1..20: mol_type = other DNA
ctgctcctcctctgccttgc

SEQ ID NO: 51743 - DNA, 20 bp, synthetic construct
  misc_feature 1..20: note = chemically synthesized
  source 1..20: mol_type = other DNA
cctcctctgccttgctggac

SEQ ID NO: 51744 - DNA, 20 bp, synthetic construct
  misc_feature 1..20: note = chemically synthesized
  source 1..20: mol_type = other DNA
ctggactggtatttgtgtct

SEQ ID NO: 51745 - DNA, 20 bp, synthetic construct
  misc_feature 1..20: note = chemically synthesized
  source 1..20: mol_type = other DNA
tggactggtatttgtgtctg

SEQ ID NO: 51746 - DNA, 20 bp, synthetic construct
  misc_feature 1..20: note = chemically synthesized
  source 1..20: mol_type = other DNA
ctggtatttgtgtctgaggc

SEQ ID NO: 51747 - DNA, 20 bp, synthetic construct
  misc_feature 1..20: note = chemically synthesized
  source 1..20: mol_type = other DNA
tgtgtctgaggctggcccta

SEQ ID NO: 51748 - DNA, 20 bp, synthetic construct
  misc_feature 1..20: note = chemically synthesized
  source 1..20: mol_type = other DNA
tctgaggctggccctacggt

SEQ ID NO: 51749 - DNA, 20 bp, synthetic construct
  misc_feature 1..20: note = chemically synthesized
  source 1..20: mol_type = other DNA
gacatcccattcctacattt

SEQ ID NO: 51750 - DNA, 20 bp, synthetic construct
  misc_feature 1..20: note = chemically synthesized
  source 1..20: mol_type = other DNA
tttaagattcacgctaaatg

SEQ ID NO: 51751 - DNA, 20 bp, synthetic construct
  misc_feature 1..20: note = chemically synthesized
  source 1..20: mol_type = other DNA
aagattcacgctaaatgaag

SEQ ID NO: 51752 - DNA, 20 bp, synthetic construct
  misc_feature 1..20: note = chemically synthesized
  source 1..20: mol_type = other DNA
attcacgctaaatgaagtag

SEQ ID NO: 51753 - DNA, 20 bp, synthetic construct
  misc_feature 1..20: note = chemically synthesized
  source 1..20: mol_type = other DNA
gaagtagaagtgactccttc

SEQ ID NO: 51754 - DNA, 20 bp, synthetic construct
  misc_feature 1..20: note = chemically synthesized
  source 1..20: mol_type = other DNA
ctccttccagctttgccaac

SEQ ID NO: 51755 - DNA, 20 bp, synthetic construct
  misc_feature 1..20: note = chemically synthesized
  source 1..20: mol_type = other DNA
tgccaaccagcttttattac

SEQ ID NO: 51756 - DNA, 20 bp, synthetic construct
  misc_feature 1..20: note = chemically synthesized
  source 1..20: mol_type = other DNA
gccaaccagcttttattact

SEQ ID NO: 51757 - DNA, 20 bp, synthetic construct
  misc_feature 1..20: note = chemically synthesized
  source 1..20: mol_type = other DNA
ccaaccagcttttattacta

SEQ ID NO: 51758 - DNA, 20 bp, synthetic construct
  misc_feature 1..20: note = chemically synthesized
  source 1..20: mol_type = other DNA
ccagcttttattactagggc

SEQ ID NO: 51759 - DNA, 20 bp, synthetic construct
  misc_feature 1..20: note = chemically synthesized
  source 1..20: mol_type = other DNA
cagcttttattactagggca

SEQ ID NO: 51760 - DNA, 20 bp, synthetic construct
  misc_feature 1..20: note = chemically synthesized
  source 1..20: mol_type = other DNA
agcttttattactagggcaa

SEQ ID NO: 51761 - DNA, 20 bp, synthetic construct
  misc_feature 1..20: note = chemically synthesized
  source 1..20: mol_type = other DNA
attactagggcaagggtacc

SEQ ID NO: 51762 - DNA, 20 bp, synthetic construct
  misc_feature 1..20: note = chemically synthesized
  source 1..20: mol_type = other DNA
taattaattcaaacttcaaa

SEQ ID NO: 51763 - DNA, 20 bp, synthetic construct
  misc_feature 1..20: note = chemically synthesized
  source 1..20: mol_type = other DNA
ttcaaacttcaaaaagaatg

SEQ ID NO: 51764 - DNA, 20 bp, synthetic construct
  misc_feature 1..20: note = chemically synthesized
  source 1..20: mol_type = other DNA
aaaaagaatgaagttccact

SEQ ID NO: 51765 - DNA, 20 bp, synthetic construct
  misc_feature 1..20: note = chemically synthesized
  source 1..20: mol_type = other DNA
gaagttccactgagcttact

SEQ ID NO: 51766 - DNA, 20 bp, synthetic construct
  misc_feature 1..20: note = chemically synthesized
  source 1..20: mol_type = other DNA
ttccactgagcttactgagc

SEQ ID NO: 51767 - DNA, 20 bp, synthetic construct
  misc_feature 1..20: note = chemically synthesized
  source 1..20: mol_type = other DNA
tccactgagcttactgagct

SEQ ID NO: 51768 - DNA, 20 bp, synthetic construct
  misc_feature 1..20: note = chemically synthesized
  source 1..20: mol_type = other DNA
tgagctgggacttgaactct

SEQ ID NO: 51769 - DNA, 20 bp, synthetic construct
  misc_feature 1..20: note = chemically synthesized
  source 1..20: mol_type = other DNA
agcattctacctcattgctt

SEQ ID NO: 51770 - DNA, 20 bp, synthetic construct
  misc_feature 1..20: note = chemically synthesized
  source 1..20: mol_type = other DNA
acctcattgctttggtgcat

SEQ ID NO: 51771 - DNA, 20 bp, synthetic construct
  misc_feature 1..20: note = chemically synthesized
  source 1..20: mol_type = other DNA
cctcattgctttggtgcatt

SEQ ID NO: 51772 - DNA, 20 bp, synthetic construct
  misc_feature 1..20: note = chemically synthesized
  source 1..20: mol_type = other DNA
tgcattaggtttgtaatatc

SEQ ID NO: 51773 - DNA, 20 bp, synthetic construct
  misc_feature 1..20: note = chemically synthesized
  source 1..20: mol_type = other DNA
atctggtacctctgtttcct

SEQ ID NO: 51774 - DNA, 20 bp, synthetic construct
  misc_feature 1..20: note = chemically synthesized
  source 1..20: mol_type = other DNA
ggtacctctgtttcctcaga

SEQ ID NO: 51775 - DNA, 20 bp, synthetic construct
  misc_feature 1..20: note = chemically synthesized
  source 1..20: mol_type = other DNA
ctgtttcctcagatagatga

SEQ ID NO: 51776 - DNA, 20 bp, synthetic construct
  misc_feature 1..20: note = chemically synthesized
  source 1..20: mol_type = other DNA
tcagatagatgatagaaata

SEQ ID NO: 51777 - DNA, 20 bp, synthetic construct
  misc_feature 1..20: note = chemically synthesized
  source 1..20: mol_type = other DNA
agaaataaagatatgatatt

SEQ ID NO: 51778 - DNA, 20 bp, synthetic construct
  misc_feature 1..20: note = chemically synthesized
  source 1..20: mol_type = other DNA
gaaataaagatatgatatta

SEQ ID NO: 51779 - DNA, 20 bp, synthetic construct
  misc_feature 1..20: note = chemically synthesized
  source 1..20: mol_type = other DNA
ataaagatatgatattaagg

SEQ ID NO: 51780 - DNA, 20 bp, synthetic construct
  misc_feature 1..20: note = chemically synthesized
  source 1..20: mol_type = other DNA
agctgttaatactgaatttt

SEQ ID NO: 51781 - DNA, 20 bp, synthetic construct
  misc_feature 1..20: note = chemically synthesized
  source 1..20: mol_type = other DNA
ttaatactgaattttcagaa

SEQ ID NO: 51782 - DNA, 20 bp, synthetic construct
  misc_feature 1..20: note = chemically synthesized
  source 1..20: mol_type = other DNA
atccctccataaaatgtatt

SEQ ID NO: 51783 - DNA, 20 bp, synthetic construct
  misc_feature 1..20: note = chemically synthesized
  source 1..20: mol_type = other DNA
tccctccataaaatgtattt

SEQ ID NO: 51784 - DNA, 20 bp, synthetic construct
  misc_feature 1..20: note = chemically synthesized
  source 1..20: mol_type = other DNA
ccctccataaaatgtatttg

SEQ ID NO: 51785 - DNA, 20 bp, synthetic construct
  misc_feature 1..20: note = chemically synthesized
  source 1..20: mol_type = other DNA
cctccataaaatgtatttgg

SEQ ID NO: 51786 - DNA, 20 bp, synthetic construct
  misc_feature 1..20: note = chemically synthesized
  source 1..20: mol_type = other DNA
tgtatttgggggacaaactg

SEQ ID NO: 51787 - DNA, 20 bp, synthetic construct
  misc_feature 1..20: note = chemically synthesized
  source 1..20: mol_type = other DNA
gtatttgggggacaaactgc

SEQ ID NO: 51788 - DNA, 20 bp, synthetic construct
  misc_feature 1..20: note = chemically synthesized
  source 1..20: mol_type = other DNA
atttgggggacaaactgcag

SEQ ID NO: 51789 - DNA, 20 bp, synthetic construct
  misc_feature 1..20: note = chemically synthesized
  source 1..20: mol_type = other DNA
aactgcaggagattatattc

SEQ ID NO: 51790 - DNA, 20 bp, synthetic construct
  misc_feature 1..20: note = chemically synthesized
  source 1..20: mol_type = other DNA
gagattatattctggcccta

SEQ ID NO: 51791 - DNA, 20 bp, synthetic construct
  misc_feature 1..20: note = chemically synthesized
  source 1..20: mol_type = other DNA
atttattgattaatctttaa

SEQ ID NO: 51792 - DNA, 20 bp, synthetic construct
  misc_feature 1..20: note = chemically synthesized
  source 1..20: mol_type = other DNA
tttattgattaatctttaaa

SEQ ID NO: 51793 - DNA, 20 bp, synthetic construct
  misc_feature 1..20: note = chemically synthesized
  source 1..20: mol_type = other DNA
tgattaatctttaaaaggct

SEQ ID NO: 51794 - DNA, 20 bp, synthetic construct
  misc_feature 1..20: note = chemically synthesized
  source 1..20: mol_type = other DNA
aggcttagtgaacaatattc

SEQ ID NO: 51795 - DNA, 20 bp, synthetic construct
  misc_feature 1..20: note = chemically synthesized
  source 1..20: mol_type = other DNA
ttagtgaacaatattctagt

SEQ ID NO: 51796 - DNA, 20 bp, synthetic construct
  misc_feature 1..20: note = chemically synthesized
  source 1..20: mol_type = other DNA
tatctaattcttaaatcctc

SEQ ID NO: 51797 - DNA, 20 bp, synthetic construct
  misc_feature 1..20: note = chemically synthesized
  source 1..20: mol_type = other DNA
ctaattcttaaatcctctag

SEQ ID NO: 51798 - DNA, 20 bp, synthetic construct
  misc_feature 1..20: note = chemically synthesized
  source 1..20: mol_type = other DNA
aattaactaatactataaaa

SEQ ID NO: 51799 - DNA, 20 bp, synthetic construct
  misc_feature 1..20: note = chemically synthesized
  source 1..20: mol_type = other DNA
attaactaatactataaaat

SEQ ID NO: 51800 - DNA, 20 bp, synthetic construct
  misc_feature 1..20: note = chemically synthesized
  source 1..20: mol_type = other DNA
ctaatactataaaatgggtc

SEQ ID NO: 51801 - DNA, 20 bp, synthetic construct
  misc_feature 1..20: note = chemically synthesized
  source 1..20: mol_type = other DNA
ctataaaatgggtctggatg

SEQ ID NO: 51802 - DNA, 20 bp, synthetic construct
  misc_feature 1..20: note = chemically synthesized
  source 1..20: mol_type = other DNA
tgacattattttataacaac

SEQ ID NO: 51803 - DNA, 20 bp, synthetic construct
  misc_feature 1..20: note = chemically synthesized
  source 1..20: mol_type = other DNA
attattttataacaactggt

SEQ ID NO: 51804 - DNA, 20 bp, synthetic construct
  misc_feature 1..20: note = chemically synthesized
  source 1..20: mol_type = other DNA
tattttataacaactggtaa

SEQ ID NO: 51805 - DNA, 20 bp, synthetic construct
  misc_feature 1..20: note = chemically synthesized
  source 1..20: mol_type = other DNA
attttataacaactggtaag

SEQ ID NO: 51806 - DNA, 20 bp, synthetic construct
  misc_feature 1..20: note = chemically synthesized
  source 1..20: mol_type = other DNA
ttttataacaactggtaaga

SEQ ID NO: 51807 - DNA, 20 bp, synthetic construct
  misc_feature 1..20: note = chemically synthesized
  source 1..20: mol_type = other DNA
ttataacaactggtaagagg

SEQ ID NO: 51808 - DNA, 20 bp, synthetic construct
  misc_feature 1..20: note = chemically synthesized
  source 1..20: mol_type = other DNA
ctggtaagagggagtgacta

SEQ ID NO: 51809 - DNA, 20 bp, synthetic construct
  misc_feature 1..20: note = chemically synthesized
  source 1..20: mol_type = other DNA
agcaacaactaaaatgatct

SEQ ID NO: 51810 - DNA, 20 bp, synthetic construct
  misc_feature 1..20: note = chemically synthesized
  source 1..20: mol_type = other DNA
gcaacaactaaaatgatctc

SEQ ID NO: 51811 - DNA, 20 bp, synthetic construct
  misc_feature 1..20: note = chemically synthesized
  source 1..20: mol_type = other DNA
tgatctcaggaaaacctgtt

SEQ ID NO: 51812 - DNA, 20 bp, synthetic construct
  misc_feature 1..20: note = chemically synthesized
  source 1..20: mol_type = other DNA
aacctgtttggccctatgta

SEQ ID NO: 51813 - DNA, 20 bp, synthetic construct
  misc_feature 1..20: note = chemically synthesized
  source 1..20: mol_type = other DNA
tatggtacattacatctttt

SEQ ID NO: 51814 - DNA, 20 bp, synthetic construct
  misc_feature 1..20: note = chemically synthesized
  source 1..20: mol_type = other DNA
tttcagtaattccactcaaa

SEQ ID NO: 51815 - DNA, 20 bp, synthetic construct
  misc_feature 1..20: note = chemically synthesized
  source 1..20: mol_type = other DNA
tcagtaattccactcaaatg

SEQ ID NO: 51816 - DNA, 20 bp, synthetic construct
  misc_feature 1..20: note = chemically synthesized
  source 1..20: mol_type = other DNA
tcaaatggagacttttaaca

SEQ ID NO: 51817 - DNA, 20 bp, synthetic construct
  misc_feature 1..20: note = chemically synthesized
  source 1..20: mol_type = other DNA
tttaacaaagcaactgttct

SEQ ID NO: 51818 - DNA, 20 bp, synthetic construct
  misc_feature 1..20: note = chemically synthesized
  source 1..20: mol_type = other DNA
ttaacaaagcaactgttctc

SEQ ID NO: 51819 - DNA, 20 bp, synthetic construct
  misc_feature 1..20: note = chemically synthesized
  source 1..20: mol_type = other DNA
taacaaagcaactgttctca

SEQ ID NO: 51820 - DNA, 20 bp, synthetic construct
  misc_feature 1..20: note = chemically synthesized
  source 1..20: mol_type = other DNA
aacaaagcaactgttctcag

SEQ ID NO: 51821 - DNA, 20 bp, synthetic construct
  misc_feature 1..20: note = chemically synthesized
  source 1..20: mol_type = other DNA
aaattcattatacacatccc

SEQ ID NO: 51822 - DNA, 20 bp, synthetic construct
  misc_feature 1..20: note = chemically synthesized
  source 1..20: mol_type = other DNA
ttatacacatccctggttga

SEQ ID NO: 51823 - DNA, 20 bp, synthetic construct
  misc_feature 1..20: note = chemically synthesized
  source 1..20: mol_type = other DNA
tacacatccctggttgatag

SEQ ID NO: 51824 - DNA, 20 bp, synthetic construct
  misc_feature 1..20: note = chemically synthesized
  source 1..20: mol_type = other DNA
ctggttgatagcagtgtgtc

SEQ ID NO: 51825 - DNA, 20 bp, synthetic construct
  misc_feature 1..20: note = chemically synthesized
  source 1..20: mol_type = other DNA
ggttgatagcagtgtgtctg

SEQ ID NO: 51826 - DNA, 20 bp, synthetic construct
  misc_feature 1..20: note = chemically synthesized
  source 1..20: mol_type = other DNA
gttgatagcagtgtgtctgg

SEQ ID NO: 51827 - DNA, 20 bp, synthetic construct
  misc_feature 1..20: note = chemically synthesized
  source 1..20: mol_type = other DNA
gatagcagtgtgtctggagg

SEQ ID NO: 51828 - DNA, 20 bp, synthetic construct
  misc_feature 1..20: note = chemically synthesized
  source 1..20: mol_type = other DNA
ggcagaaaccattcttgctt

SEQ ID NO: 51829 - DNA, 20 bp, synthetic construct
  misc_feature 1..20: note = chemically synthesized
  source 1..20: mol_type = other DNA
aattacgtctgtgttatact

SEQ ID NO: 51830 - DNA, 20 bp, synthetic construct
  misc_feature 1..20: note = chemically synthesized
  source 1..20: mol_type = other DNA
tacgtctgtgttatactgag

SEQ ID NO: 51831 - DNA, 20 bp, synthetic construct
  misc_feature 1..20: note = chemically synthesized
  source 1..20: mol_type = other DNA
acgtctgtgttatactgagt

SEQ ID NO: 51832 - DNA, 20 bp, synthetic construct
  misc_feature 1..20: note = chemically synthesized
  source 1..20: mol_type = other DNA
cgtctgtgttatactgagta

SEQ ID NO: 51833 - DNA, 20 bp, synthetic construct
  misc_feature 1..20: note = chemically synthesized
  source 1..20: mol_type = other DNA
ctgtgttatactgagtaggg

SEQ ID NO: 51834 - DNA, 20 bp, synthetic construct
  misc_feature 1..20: note = chemically synthesized
  source 1..20: mol_type = other DNA
gacacttacgttcctgataa

SEQ ID NO: 51835 - DNA, 20 bp, synthetic construct
  misc_feature 1..20: note = chemically synthesized
  source 1..20: mol_type = other DNA
acacttacgttcctgataat

SEQ ID NO: 51836 - DNA, 20 bp, synthetic construct
  misc_feature 1..20: note = chemically synthesized
  source 1..20: mol_type = other DNA
tacgttcctgataatgggat

SEQ ID NO: 51837 - DNA, 20 bp, synthetic construct
  misc_feature 1..20: note = chemically synthesized
  source 1..20: mol_type = other DNA
gtgtaattcttgtttcgctc

SEQ ID NO: 51838 - DNA, 20 bp, synthetic construct
  misc_feature 1..20: note = chemically synthesized
  source 1..20: mol_type = other DNA
tccagatttctaataccaca

SEQ ID NO: 51839 - DNA, 20 bp, synthetic construct
  misc_feature 1..20: note = chemically synthesized
  source 1..20: mol_type = other DNA
tcacgtgtcttctctacacc

SEQ ID NO: 51840 - DNA, 20 bp, synthetic construct
  misc_feature 1..20: note = chemically synthesized
  source 1..20: mol_type = other DNA
cacgtgtcttctctacaccc

SEQ ID NO: 51841 - DNA, 20 bp, synthetic construct
  misc_feature 1..20: note = chemically synthesized
  source 1..20: mol_type = other DNA
acgtgtcttctctacaccca

SEQ ID NO: 51842 - DNA, 20 bp, synthetic construct
  misc_feature 1..20: note = chemically synthesized
  source 1..20: mol_type = other DNA
cttctctacacccagggcac

SEQ ID NO: 51843 - DNA, 20 bp, synthetic construct
  misc_feature 1..20: note = chemically synthesized
  source 1..20: mol_type = other DNA
cccagggcaccggtgaatcc

SEQ ID NO: 51844 - DNA, 20 bp, synthetic construct
  misc_feature 1..20: note = chemically synthesized
  source 1..20: mol_type = other DNA
tgaatccaagtgtcctctga

SEQ ID NO: 51845 - DNA, 20 bp, synthetic construct
  misc_feature 1..20: note = chemically synthesized
  source 1..20: mol_type = other DNA
caagtgtcctctgatggtca

SEQ ID NO: 51846 - DNA, 20 bp, synthetic construct
  misc_feature 1..20: note = chemically synthesized
  source 1..20: mol_type = other DNA
tcctctgatggtcaaagttc

SEQ ID NO: 51847 - DNA, 20 bp, synthetic construct
  misc_feature 1..20: note = chemically synthesized
  source 1..20: mol_type = other DNA
caaagttctagatgctgtcc

SEQ ID NO: 51848 - DNA, 20 bp, synthetic construct
  misc_feature 1..20: note = chemically synthesized
  source 1..20: mol_type = other DNA
aaagttctagatgctgtccg

SEQ ID NO: 51849 - DNA, 20 bp, synthetic construct
  misc_feature 1..20: note = chemically synthesized
  source 1..20: mol_type = other DNA
gttctagatgctgtccgagg

SEQ ID NO: 51850 - DNA, 20 bp, synthetic construct
  misc_feature 1..20: note = chemically synthesized
  source 1..20: mol_type = other DNA
aggcagtcctgccatcaatg

SEQ ID NO: 51851 - DNA, 20 bp, synthetic construct
  misc_feature 1..20: note = chemically synthesized
  source 1..20: mol_type = other DNA
aatgtggccgtgcatgtgtt

SEQ ID NO: 51852 - DNA, 20 bp, synthetic construct
  misc_feature 1..20: note = chemically synthesized
  source 1..20: mol_type = other DNA
tggccgtgcatgtgttcaga

SEQ ID NO: 51853 - DNA, 20 bp, synthetic construct
  misc_feature 1..20: note = chemically synthesized
  source 1..20: mol_type = other DNA
ggccgtgcatgtgttcagaa

SEQ ID NO: 51854 - DNA, 20 bp, synthetic construct
  misc_feature 1..20: note = chemically synthesized
  source 1..20: mol_type = other DNA
gaaaggctgctgatgacacc

SEQ ID NO: 51855 - DNA, 20 bp, synthetic construct
  misc_feature 1..20: note = chemically synthesized
  source 1..20: mol_type = other DNA
aaaggctgctgatgacacct

SEQ ID NO: 51856 - DNA, 20 bp, synthetic construct
  misc_feature 1..20: note = chemically synthesized
  source 1..20: mol_type = other DNA
aggctgctgatgacacctgg

SEQ ID NO: 51857 - DNA, 20 bp, synthetic construct
  misc_feature 1..20: note = chemically synthesized
  source 1..20: mol_type = other DNA
acctgggagccatttgcctc

SEQ ID NO: 51858 - DNA, 20 bp, synthetic construct
  misc_feature 1..20: note = chemically synthesized
  source 1..20: mol_type = other DNA
aaatggctcccaggtgtcat

SEQ ID NO: 51859 - DNA, 20 bp, synthetic construct
  misc_feature 1..20: note = chemically synthesized
  source 1..20: mol_type = other DNA
tggctcccaggtgtcatcag

SEQ ID NO: 51860 - DNA, 20 bp, synthetic construct
  misc_feature 1..20: note = chemically synthesized
  source 1..20: mol_type = other DNA
agcctttctgaacacatgca

SEQ ID NO: 51861 - DNA, 20 bp, synthetic construct
  misc_feature 1..20: note = chemically synthesized
  source 1..20: mol_type = other DNA
cacatgcacggccacattga

SEQ ID NO: 51862 - DNA, 20 bp, synthetic construct
  misc_feature 1..20: note = chemically synthesized
  source 1..20: mol_type = other DNA
atgcacggccacattgatgg

SEQ ID NO: 51863 - DNA, 20 bp, synthetic construct
  misc_feature 1..20: note = chemically synthesized
  source 1..20: mol_type = other DNA
tgcacggccacattgatggc

SEQ ID NO: 51864 - DNA, 20 bp, synthetic construct
  misc_feature 1..20: note = chemically synthesized
  source 1..20: mol_type = other DNA
cattgatggcaggactgcct

SEQ ID NO: 51865 - DNA, 20 bp, synthetic construct
  misc_feature 1..20: note = chemically synthesized
  source 1..20: mol_type = other DNA
gatggcaggactgcctcgga

SEQ ID NO: 51866 - DNA, 20 bp, synthetic construct
  misc_feature 1..20: note = chemically synthesized
  source 1..20: mol_type = other DNA
ggactgcctcggacagcatc

SEQ ID NO: 51867 - DNA, 20 bp, synthetic construct
  misc_feature 1..20: note = chemically synthesized
  source 1..20: mol_type = other DNA
gcatctagaactttgaccat

SEQ ID NO: 51868 - DNA, 20 bp, synthetic construct
  misc_feature 1..20: note = chemically synthesized
  source 1..20: mol_type = other DNA
atctagaactttgaccatca

SEQ ID NO: 51869 - DNA, 20 bp, synthetic construct
  misc_feature 1..20: note = chemically synthesized
  source 1..20: mol_type = other DNA
tctagaactttgaccatcag

SEQ ID NO: 51870 - DNA, 20 bp, synthetic construct
  misc_feature 1..20: note = chemically synthesized
  source 1..20: mol_type = other DNA
tttgaccatcagaggacact

SEQ ID NO: 51871 - DNA, 20 bp, synthetic construct
  misc_feature 1..20: note = chemically synthesized
  source 1..20: mol_type = other DNA
cagaggacacttggattcac

SEQ ID NO: 51872 - DNA, 20 bp, synthetic construct
  misc_feature 1..20: note = chemically synthesized
  source 1..20: mol_type = other DNA
acttggattcaccggtgccc

SEQ ID NO: 51873 - DNA, 20 bp, synthetic construct
  misc_feature 1..20: note = chemically synthesized
  source 1..20: mol_type = other DNA
cttggattcaccggtgccct

SEQ ID NO: 51874 - DNA, 20 bp, synthetic construct
  misc_feature 1..20: note = chemically synthesized
  source 1..20: mol_type = other DNA
attcaccggtgccctgggtg

SEQ ID NO: 51875 - DNA, 20 bp, synthetic construct
  misc_feature 1..20: note = chemically synthesized
  source 1..20: mol_type = other DNA
tcaccggtgccctgggtgta

SEQ ID NO: 51876 - DNA, 20 bp, synthetic construct
  misc_feature 1..20: note = chemically synthesized
  source 1..20: mol_type = other DNA
ccggtgccctgggtgtagag

SEQ ID NO: 51877 - DNA, 20 bp, synthetic construct
  misc_feature 1..20: note = chemically synthesized
  source 1..20: mol_type = other DNA
tgggtgtagagaagacacgt

SEQ ID NO: 51878 - DNA, 20 bp, synthetic construct
  misc_feature 1..20: note = chemically synthesized
  source 1..20: mol_type = other DNA
gtgtagagaagacacgtgag

SEQ ID NO: 51879 - DNA, 20 bp, synthetic construct
  misc_feature 1..20: note = chemically synthesized
  source 1..20: mol_type = other DNA
gagaagttaacaaaattgat

SEQ ID NO: 51880 - DNA, 20 bp, synthetic construct
  misc_feature 1..20: note = chemically synthesized
  source 1..20: mol_type = other DNA
gaagttaacaaaattgatca

SEQ ID NO: 51881 - DNA, 20 bp, synthetic construct
  misc_feature 1..20: note = chemically synthesized
  source 1..20: mol_type = other DNA
aacaaaattgatcagagtga

SEQ ID NO: 51882 - DNA, 20 bp, synthetic construct
  misc_feature 1..20: note = chemically synthesized
  source 1..20: mol_type = other DNA
acaaaattgatcagagtgaa

SEQ ID NO: 51883 - DNA, 20 bp, synthetic construct
  misc_feature 1..20: note = chemically synthesized
  source 1..20: mol_type = other DNA
gtgaaaggatttattctttg

SEQ ID NO: 51884 - DNA, 20 bp, synthetic construct
  misc_feature 1..20: note = chemically synthesized
  source 1..20: mol_type = other DNA
ggatttattctttgtggtat

SEQ ID NO: 51885 - DNA, 20 bp, synthetic construct
  misc_feature 1..20: note = chemically synthesized
  source 1..20: mol_type = other DNA
tctttgtggtattagaaatc

SEQ ID NO: 51886 - DNA, 20 bp, synthetic construct
  misc_feature 1..20: note = chemically synthesized
  source 1..20: mol_type = other DNA
tttgtggtattagaaatctg

SEQ ID NO: 51887 - DNA, 20 bp, synthetic construct
  misc_feature 1..20: note = chemically synthesized
  source 1..20: mol_type = other DNA
ttagaaatctggagcgaaac

SEQ ID NO: 51888 - DNA, 20 bp, synthetic construct
  misc_feature 1..20: note = chemically synthesized
  source 1..20: mol_type = other DNA
ttacacactgatcccattat

SEQ ID NO: 51889 - DNA, 20 bp, synthetic construct
  misc_feature 1..20: note = chemically synthesized
  source 1..20: mol_type = other DNA
tacacactgatcccattatc

SEQ ID NO: 51890 - DNA, 20 bp, synthetic construct
  misc_feature 1..20: note = chemically synthesized
  source 1..20: mol_type = other DNA
gatcccattatcaggaacgt

SEQ ID NO: 51891 - DNA, 20 bp, synthetic construct
  misc_feature 1..20: note = chemically synthesized
  source 1..20: mol_type = other DNA
cgtaagtgtcgacaattaat

SEQ ID NO: 51892 - DNA, 20 bp, synthetic construct
  misc_feature 1..20: note = chemically synthesized
  source 1..20: mol_type = other DNA
aattaatgagcttccctact

SEQ ID NO: 51893 - DNA, 20 bp, synthetic construct
  misc_feature 1..20: note = chemically synthesized
  source 1..20: mol_type = other DNA
cttccctactcagtataaca

SEQ ID NO: 51894 - DNA, 20 bp, synthetic construct
  misc_feature 1..20: note = chemically synthesized
  source 1..20: mol_type = other DNA
cacagacgtaattgtttcca

SEQ ID NO: 51895 - DNA, 20 bp, synthetic construct
  misc_feature 1..20: note = chemically synthesized
  source 1..20: mol_type = other DNA
gacgtaattgtttccaaagc

SEQ ID NO: 51896 - DNA, 20 bp, synthetic construct
  misc_feature 1..20: note = chemically synthesized
  source 1..20: mol_type = other DNA
aattgtttccaaagcaagaa

SEQ ID NO: 51897 - DNA, 20 bp, synthetic construct
  misc_feature 1..20: note = chemically synthesized
  source 1..20: mol_type = other DNA
gcaagaatggtttctgcctc

SEQ ID NO: 51898 - DNA, 20 bp, synthetic construct
  misc_feature 1..20: note = chemically synthesized
  source 1..20: mol_type = other DNA
ccagacacactgctatcaac

SEQ ID NO: 51899 - DNA, 20 bp, synthetic construct
  misc_feature 1..20: note = chemically synthesized
  source 1..20: mol_type = other DNA
cagacacactgctatcaacc

SEQ ID NO: 51900 - DNA, 20 bp, synthetic construct
  misc_feature 1..20: note = chemically synthesized
  source 1..20: mol_type = other DNA
agacacactgctatcaacca

SEQ ID NO: 51901 - DNA, 20 bp, synthetic construct
  misc_feature 1..20: note = chemically synthesized
  source 1..20: mol_type = other DNA
ggatgtgtataatgaatttt

SEQ ID NO: 51902 - DNA, 20 bp, synthetic construct
  misc_feature 1..20: note = chemically synthesized
  source 1..20: mol_type = other DNA
gatgtgtataatgaatttta

SEQ ID NO: 51903 - DNA, 20 bp, synthetic construct
  misc_feature 1..20: note = chemically synthesized
  source 1..20: mol_type = other DNA
atgtgtataatgaattttaa

SEQ ID NO: 51904 - DNA, 20 bp, synthetic construct
  misc_feature 1..20: note = chemically synthesized
  source 1..20: mol_type = other DNA
gtgtataatgaattttaagg

SEQ ID NO: 51905 - DNA, 20 bp, synthetic construct
  misc_feature 1..20: note = chemically synthesized
  source 1..20: mol_type = other DNA
atgaattttaagggagaaaa

SEQ ID NO: 51906 - DNA, 20 bp, synthetic construct
  misc_feature 1..20: note = chemically synthesized
  source 1..20: mol_type = other DNA
tgaattttaagggagaaaat

SEQ ID NO: 51907 - DNA, 20 bp, synthetic construct
  misc_feature 1..20: note = chemically synthesized
  source 1..20: mol_type = other DNA
agggagaaaataggtcccct

SEQ ID NO: 51908 - DNA, 20 bp, synthetic construct
  misc_feature 1..20: note = chemically synthesized
  source 1..20: mol_type = other DNA
gaaaataggtcccctgagaa

SEQ ID NO: 51909 - DNA, 20 bp, synthetic construct
  misc_feature 1..20: note = chemically synthesized
  source 1..20: mol_type = other DNA
gagaacagttgctttgttaa

SEQ ID NO: 51910 - DNA, 20 bp, synthetic construct
  misc_feature 1..20: note = chemically synthesized
  source 1..20: mol_type = other DNA
tttgttaaaagtctccattt

SEQ ID NO: 51911 - DNA, 20 bp, synthetic construct
  misc_feature 1..20: note = chemically synthesized
  source 1..20: mol_type = other DNA
gttaaaagtctccatttgag

SEQ ID NO: 51912 - DNA, 20 bp, synthetic construct
  misc_feature 1..20: note = chemically synthesized
  source 1..20: mol_type = other DNA
atttgagtggaattactgaa

SEQ ID NO: 51913 - DNA, 20 bp, synthetic construct
  misc_feature 1..20: note = chemically synthesized
  source 1..20: mol_type = other DNA
aagatgtaatgtaccataca

SEQ ID NO: 51914 - DNA, 20 bp, synthetic construct
  misc_feature 1..20: note = chemically synthesized
  source 1..20: mol_type = other DNA
agatgtaatgtaccatacat

SEQ ID NO: 51915 - DNA, 20 bp, synthetic construct
  misc_feature 1..20: note = chemically synthesized
  source 1..20: mol_type = other DNA
gatgtaatgtaccatacata

SEQ ID NO: 51916 - DNA, 20 bp, synthetic construct
  misc_feature 1..20: note = chemically synthesized
  source 1..20: mol_type = other DNA
gtaccatacatagggccaaa

SEQ ID NO: 51917 - DNA, 20 bp, synthetic construct
  misc_feature 1..20: note = chemically synthesized
  source 1..20: mol_type = other DNA
taccatacatagggccaaac

SEQ ID NO: 51918 - DNA, 20 bp, synthetic construct
  misc_feature 1..20: note = chemically synthesized
  source 1..20: mol_type = other DNA
agggccaaacaggttttcct

SEQ ID NO: 51919 - DNA, 20 bp, synthetic construct
  misc_feature 1..20: note = chemically synthesized
  source 1..20: mol_type = other DNA
aggttttcctgagatcattt

SEQ ID NO: 51920 - DNA, 20 bp, synthetic construct
  misc_feature 1..20: note = chemically synthesized
  source 1..20: mol_type = other DNA
gatcattttagttgttgcta

SEQ ID NO: 51921 - DNA, 20 bp, synthetic construct
  misc_feature 1..20: note = chemically synthesized
  source 1..20: mol_type = other DNA
ctatagtcactccctcttac

SEQ ID NO: 51922 - DNA, 20 bp, synthetic construct
  misc_feature 1..20: note = chemically synthesized
  source 1..20: mol_type = other DNA
cagttgttataaaataatgt

SEQ ID NO: 51923 - DNA, 20 bp, synthetic construct
  misc_feature 1..20: note = chemically synthesized
  source 1..20: mol_type = other DNA
aataatgtcagaactacatc

SEQ ID NO: 51924 - DNA, 20 bp, synthetic construct
  misc_feature 1..20: note = chemically synthesized
  source 1..20: mol_type = other DNA
ctacatccagacccatttta

SEQ ID NO: 51925 - DNA, 20 bp, synthetic construct
  misc_feature 1..20: note = chemically synthesized
  source 1..20: mol_type = other DNA
ccagacccattttatagtat

SEQ ID NO: 51926 - DNA, 20 bp, synthetic construct
  misc_feature 1..20: note = chemically synthesized
  source 1..20: mol_type = other DNA
atagtattagttaattcttc

SEQ ID NO: 51927 - DNA, 20 bp, synthetic construct
  misc_feature 1..20: note = chemically synthesized
  source 1..20: mol_type = other DNA
agtattagttaattcttcta

SEQ ID NO: 51928 - DNA, 20 bp, synthetic construct
  misc_feature 1..20: note = chemically synthesized
  source 1..20: mol_type = other DNA
gtattagttaattcttctag

SEQ ID NO: 51929 - DNA, 20 bp, synthetic construct
  misc_feature 1..20: note = chemically synthesized
  source 1..20: mol_type = other DNA
ttaattcttctagaggattt

SEQ ID NO: 51930 - DNA, 20 bp, synthetic construct
  misc_feature 1..20: note = chemically synthesized
  source 1..20: mol_type = other DNA
cttctagaggatttaagaat

SEQ ID NO: 51931 - DNA, 20 bp, synthetic construct
  misc_feature 1..20: note = chemically synthesized
  source 1..20: mol_type = other DNA
ttaagaattagatatctgac

SEQ ID NO: 51932 - DNA, 20 bp, synthetic construct
  misc_feature 1..20: note = chemically synthesized
  source 1..20: mol_type = other DNA
tgactagaatattgttcact

SEQ ID NO: 51933 - DNA, 20 bp, synthetic construct
  misc_feature 1..20: note = chemically synthesized
  source 1..20: mol_type = other DNA
attgttcactaagcctttta

SEQ ID NO: 51934 - DNA, 20 bp, synthetic construct
  misc_feature 1..20: note = chemically synthesized
  source 1..20: mol_type = other DNA
aaatacgttttgaataacta

SEQ ID NO: 51935 - DNA, 20 bp, synthetic construct
  misc_feature 1..20: note = chemically synthesized
  source 1..20: mol_type = other DNA
aatacgttttgaataactat

SEQ ID NO: 51936 - DNA, 20 bp, synthetic construct
  misc_feature 1..20: note = chemically synthesized
  source 1..20: mol_type = other DNA
atacgttttgaataactata

SEQ ID NO: 51937 - DNA, 20 bp, synthetic construct
  misc_feature 1..20: note = chemically synthesized
  source 1..20: mol_type = other DNA
gttttgaataactatagggc

SEQ ID NO: 51938 - DNA, 20 bp, synthetic construct
  misc_feature 1..20: note = chemically synthesized
  source 1..20: mol_type = other DNA
ggccagaatataatctcctg

SEQ ID NO: 51939 - DNA, 20 bp, synthetic construct
  misc_feature 1..20: note = chemically synthesized
  source 1..20: mol_type = other DNA
tgtcccccaaatacatttta

SEQ ID NO: 51940 - DNA, 20 bp, synthetic construct
  misc_feature 1..20: note = chemically synthesized
  source 1..20: mol_type = other DNA
tcccccaaatacattttatg

SEQ ID NO: 51941 - DNA, 20 bp, synthetic construct
  misc_feature 1..20: note = chemically synthesized
  source 1..20: mol_type = other DNA
cccccaaatacattttatgg

SEQ ID NO: 51942 - DNA, 20 bp, synthetic construct
  misc_feature 1..20: note = chemically synthesized
  source 1..20: mol_type = other DNA
ccccaaatacattttatgga

SEQ ID NO: 51943 - DNA, 20 bp, synthetic construct
  misc_feature 1..20: note = chemically synthesized
  source 1..20: mol_type = other DNA
gggatacttttctgaaaatt

SEQ ID NO: 51944 - DNA, 20 bp, synthetic construct
  misc_feature 1..20: note = chemically synthesized
  source 1..20: mol_type = other DNA
ttctgaaaattcagtattaa

SEQ ID NO: 51945 - DNA, 20 bp, synthetic construct
  misc_feature 1..20: note = chemically synthesized
  source 1..20: mol_type = other DNA
tttatttctatcatctatct

SEQ ID NO: 51946 - DNA, 20 bp, synthetic construct
  misc_feature 1..20: note = chemically synthesized
  source 1..20: mol_type = other DNA
ttatttctatcatctatctg

SEQ ID NO: 51947 - DNA, 20 bp, synthetic construct
  misc_feature 1..20: note = chemically synthesized
  source 1..20: mol_type = other DNA
ctatcatctatctgaggaaa

SEQ ID NO: 51948 - DNA, 20 bp, synthetic construct
  misc_feature 1..20: note = chemically synthesized
  source 1..20: mol_type = other DNA
atcatctatctgaggaaaca

SEQ ID NO: 51949 - DNA, 20 bp, synthetic construct
  misc_feature 1..20: note = chemically synthesized
  source 1..20: mol_type = other DNA
tcatctatctgaggaaacag

SEQ ID NO: 51950 - DNA, 20 bp, synthetic construct
  misc_feature 1..20: note = chemically synthesized
  source 1..20: mol_type = other DNA
atctgaggaaacagaggtac

SEQ ID NO: 51951 - DNA, 20 bp, synthetic construct
  misc_feature 1..20: note = chemically synthesized
  source 1..20: mol_type = other DNA
attacaaacctaatgcacca

SEQ ID NO: 51952 - DNA, 20 bp, synthetic construct
  misc_feature 1..20: note = chemically synthesized
  source 1..20: mol_type = other DNA
acctaatgcaccaaagcaat

SEQ ID NO: 51953 - DNA, 20 bp, synthetic construct
  misc_feature 1..20: note = chemically synthesized
  source 1..20: mol_type = other DNA
cctaatgcaccaaagcaatg

SEQ ID NO: 51954 - DNA, 20 bp, synthetic construct
  misc_feature 1..20: note = chemically synthesized
  source 1..20: mol_type = other DNA
aatgcaccaaagcaatgagg

SEQ ID NO: 51955 - DNA, 20 bp, synthetic construct
  misc_feature 1..20: note = chemically synthesized
  source 1..20: mol_type = other DNA
aagcaatgaggtagaatgct

SEQ ID NO: 51956 - DNA, 20 bp, synthetic construct
  misc_feature 1..20: note = chemically synthesized
  source 1..20: mol_type = other DNA
gcaatgaggtagaatgctca

SEQ ID NO: 51957 - DNA, 20 bp, synthetic construct
  misc_feature 1..20: note = chemically synthesized
  source 1..20: mol_type = other DNA
aggtagaatgctcagagttc

SEQ ID NO: 51958 - DNA, 20 bp, synthetic construct
  misc_feature 1..20: note = chemically synthesized
  source 1..20: mol_type = other DNA
aatgctcagagttcaagtcc

SEQ ID NO: 51959 - DNA, 20 bp, synthetic construct
  misc_feature 1..20: note = chemically synthesized
  source 1..20: mol_type = other DNA
tcagagttcaagtcccagct

SEQ ID NO: 51960 - DNA, 20 bp, synthetic construct
  misc_feature 1..20: note = chemically synthesized
  source 1..20: mol_type = other DNA
agttcaagtcccagctcagt

SEQ ID NO: 51961 - DNA, 20 bp, synthetic construct
  misc_feature 1..20: note = chemically synthesized
  source 1..20: mol_type = other DNA
aagtcccagctcagtaagct

SEQ ID NO: 51962 - DNA, 20 bp, synthetic construct
  misc_feature 1..20: note = chemically synthesized
  source 1..20: mol_type = other DNA
tcccagctcagtaagctcag

SEQ ID NO: 51963 - DNA, 20 bp, synthetic construct
  misc_feature 1..20: note = chemically synthesized
  source 1..20: mol_type = other DNA
gtggaacttcattctttttg

SEQ ID NO: 51964 - DNA, 20 bp, synthetic construct
  misc_feature 1..20: note = chemically synthesized
  source 1..20: mol_type = other DNA
tgaattaattatattaaaaa

SEQ ID NO: 51965 - DNA, 20 bp, synthetic construct
  misc_feature 1..20: note = chemically synthesized
  source 1..20: mol_type = other DNA
attatattaaaaatagatgc

SEQ ID NO: 51966 - DNA, 20 bp, synthetic construct
  misc_feature 1..20: note = chemically synthesized
  source 1..20: mol_type = other DNA
ttatattaaaaatagatgct

SEQ ID NO: 51967 - DNA, 20 bp, synthetic construct
  misc_feature 1..20: note = chemically synthesized
  source 1..20: mol_type = other DNA
gatgctgggtacccttgccc

SEQ ID NO: 51968 - DNA, 20 bp, synthetic construct
  misc_feature 1..20: note = chemically synthesized
  source 1..20: mol_type = other DNA
tacccttgccctagtaataa

SEQ ID NO: 51969 - DNA, 20 bp, synthetic construct
  misc_feature 1..20: note = chemically synthesized
  source 1..20: mol_type = other DNA
cttgccctagtaataaaagc

SEQ ID NO: 51970 - DNA, 20 bp, synthetic construct
  misc_feature 1..20: note = chemically synthesized
  source 1..20: mol_type = other DNA
ccctagtaataaaagctggt

SEQ ID NO: 51971 - DNA, 20 bp, synthetic construct
  misc_feature 1..20: note = chemically synthesized
  source 1..20: mol_type = other DNA
gtaataaaagctggttggca

SEQ ID NO: 51972 - DNA, 20 bp, synthetic construct
  misc_feature 1..20: note = chemically synthesized
  source 1..20: mol_type = other DNA
taaaagctggttggcaaagc

SEQ ID NO: 51973 - DNA, 20 bp, synthetic construct
  misc_feature 1..20: note = chemically synthesized
  source 1..20: mol_type = other DNA
aagctggttggcaaagctgg

SEQ ID NO: 51974 - DNA, 20 bp, synthetic construct
  misc_feature 1..20: note = chemically synthesized
  source 1..20: mol_type = other DNA
agctggttggcaaagctgga

SEQ ID NO: 51975 - DNA, 20 bp, synthetic construct
  misc_feature 1..20: note = chemically synthesized
  source 1..20: mol_type = other DNA
ctggttggcaaagctggaag

SEQ ID NO: 51976 - DNA, 20 bp, synthetic construct
  misc_feature 1..20: note = chemically synthesized
  source 1..20: mol_type = other DNA
ggagtcacttctacttcatt

SEQ ID NO: 51977 - DNA, 20 bp, synthetic construct
  misc_feature 1..20: note = chemically synthesized
  source 1..20: mol_type = other DNA
tttagcgtgaatcttaaatg

SEQ ID NO: 51978 - DNA, 20 bp, synthetic construct
  misc_feature 1..20: note = chemically synthesized
  source 1..20: mol_type = other DNA
ttagcgtgaatcttaaatgt

SEQ ID NO: 51979 - DNA, 20 bp, synthetic construct
  misc_feature 1..20: note = chemically synthesized
  source 1..20: mol_type = other DNA
gtgaatcttaaatgtaggaa

SEQ ID NO: 51980 - DNA, 20 bp, synthetic construct
  misc_feature 1..20: note = chemically synthesized
  source 1..20: mol_type = other DNA
tgaatcttaaatgtaggaat

SEQ ID NO: 51981 - DNA, 20 bp, synthetic construct
  misc_feature 1..20: note = chemically synthesized
  source 1..20: mol_type = other DNA
aatgtaggaatgggatgtca

SEQ ID NO: 51982 - DNA, 20 bp, synthetic construct
  misc_feature 1..20: note = chemically synthesized
  source 1..20: mol_type = other DNA
tgtcacagaaacactcaccg

SEQ ID NO: 51983 - DNA, 20 bp, synthetic construct
  misc_feature 1..20: note = chemically synthesized
  source 1..20: mol_type = other DNA
gtcacagaaacactcaccgt

SEQ ID NO: 51984 - DNA, 20 bp, synthetic construct
  misc_feature 1..20: note = chemically synthesized
  source 1..20: mol_type = other DNA
tcacagaaacactcaccgta

SEQ ID NO: 51985 - DNA, 20 bp, synthetic construct
  misc_feature 1..20: note = chemically synthesized
  source 1..20: mol_type = other DNA
agaaacactcaccgtagggc

SEQ ID NO: 51986 - DNA, 20 bp, synthetic construct
  misc_feature 1..20: note = chemically synthesized
  source 1..20: mol_type = other DNA
actcaccgtagggccagcct

SEQ ID NO: 51987 - DNA, 20 bp, synthetic construct
  misc_feature 1..20: note = chemically synthesized
  source 1..20: mol_type = other DNA
ccagcctcagacacaaatac

SEQ ID NO: 51988 - DNA, 20 bp, synthetic construct
  misc_feature 1..20: note = chemically synthesized
  source 1..20: mol_type = other DNA
ctcagacacaaataccagtc

SEQ ID NO: 51989 - DNA, 20 bp, synthetic construct
  misc_feature 1..20: note = chemically synthesized
  source 1..20: mol_type = other DNA
gacacaaataccagtccagc

SEQ ID NO: 51990 - DNA, 20 bp, synthetic construct
  misc_feature 1..20: note = chemically synthesized
  source 1..20: mol_type = other DNA
acacaaataccagtccagca

SEQ ID NO: 51991 - DNA, 20 bp, synthetic construct
  misc_feature 1..20: note = chemically synthesized
  source 1..20: mol_type = other DNA
caaataccagtccagcaagg

SEQ ID NO: 51992 - DNA, 20 bp, synthetic construct
  misc_feature 1..20: note = chemically synthesized
  source 1..20: mol_type = other DNA
aataccagtccagcaaggca

SEQ ID NO: 51993 - DNA, 20 bp, synthetic construct
  misc_feature 1..20: note = chemically synthesized
  source 1..20: mol_type = other DNA
ataccagtccagcaaggcag

SEQ ID NO: 51994 - DNA, 20 bp, synthetic construct
  misc_feature 1..20: note = chemically synthesized
  source 1..20: mol_type = other DNA
accagtccagcaaggcagag

SEQ ID NO: 51995 - DNA, 20 bp, synthetic construct
  misc_feature 1..20: note = chemically synthesized
  source 1..20: mol_type = other DNA
ccagtccagcaaggcagagg

SEQ ID NO: 51996 - DNA, 20 bp, synthetic construct
  misc_feature 1..20: note = chemically synthesized
  source 1..20: mol_type = other DNA
agtccagcaaggcagaggag

SEQ ID NO: 51997 - DNA, 20 bp, synthetic construct
  misc_feature 1..20: note = chemically synthesized
  source 1..20: mol_type = other DNA
ccagcaaggcagaggaggag

SEQ ID NO: 51998 - DNA, 20 bp, synthetic construct
  misc_feature 1..20: note = chemically synthesized
  source 1..20: mol_type = other DNA
gcagaggaggagcagacgat

SEQ ID NO: 51999 - DNA, 20 bp, synthetic construct
  misc_feature 1..20: note = chemically synthesized
  source 1..20: mol_type = other DNA
gaggaggagcagacgatgag

SEQ ID NO: 52000 - DNA, 20 bp, synthetic construct
  misc_feature 1..20: note = chemically synthesized
  source 1..20: mol_type = other DNA
cgatgagaagccatcctgcc

SEQ ID NO: 52001 - DNA, 20 bp, synthetic construct
  misc_feature 1..20: note = chemically synthesized
  source 1..20: mol_type = other DNA
gaagccatcctgccaagaat

SEQ ID NO: 52002 - DNA, 20 bp, synthetic construct
  misc_feature 1..20: note = chemically synthesized
  source 1..20: mol_type = other DNA
gccatcctgccaagaatgag

SEQ ID NO: 52003 - DNA, 20 bp, synthetic construct
  misc_feature 1..20: note = chemically synthesized
  source 1..20: mol_type = other DNA
gaatgagtggacttctgtga

SEQ ID NO: 52004 - DNA, 20 bp, synthetic construct
  misc_feature 1..20: note = chemically synthesized
  source 1..20: mol_type = other DNA
acttctgtgatggctgctcc

SEQ ID NO: 52005 - DNA, 20 bp, synthetic construct
  misc_feature 1..20: note = chemically synthesized
  source 1..20: mol_type = other DNA
tgtgatggctgctcccagcc

SEQ ID NO: 52006 - DNA, 20 bp, synthetic construct
  misc_feature 1..20: note = chemically synthesized
  source 1..20: mol_type = other DNA
gtgatggctgctcccagcct

SEQ ID NO: 52007 - DNA, 20 bp, synthetic construct
  misc_feature 1..20: note = chemically synthesized
  source 1..20: mol_type = other DNA
tgatggctgctcccagcctg

SEQ ID NO: 52008 - DNA, 20 bp, synthetic construct
  misc_feature 1..20: note = chemically synthesized
  source 1..20: mol_type = other DNA
cttttatactcacttctcct

SEQ ID NO: 52009 - DNA, 20 bp, synthetic construct
  misc_feature 1..20: note = chemically synthesized
  source 1..20: mol_type = other DNA
tatactcacttctcctgagc

SEQ ID NO: 52010 - DNA, 20 bp, synthetic construct
  misc_feature 1..20: note = chemically synthesized
  source 1..20: mol_type = other DNA
atactcacttctcctgagct

SEQ ID NO: 52011 - DNA, 20 bp, synthetic construct
  misc_feature 1..20: note = chemically synthesized
  source 1..20: mol_type = other DNA
gctgattctgattattgact

SEQ ID NO: 52012 - DNA, 20 bp, synthetic construct
  misc_feature 1..20: note = chemically synthesized
  source 1..20: mol_type = other DNA
aggtttgcagtcagattggc

SEQ ID NO: 52013 - DNA, 20 bp, synthetic construct
  misc_feature 1..20: note = chemically synthesized
  source 1..20: mol_type = other DNA
agcagcctagctcaggagaa

SEQ ID NO: 52014 - DNA, 20 bp, synthetic construct
  misc_feature 1..20: note = chemically synthesized
  source 1..20: mol_type = other DNA
agaagtccactcattcttgg

SEQ ID NO: 52015 - DNA, 20 bp, synthetic construct
  misc_feature 1..20: note = chemically synthesized
  source 1..20: mol_type = other DNA
tgtctgaggctggccctacg

SEQ ID NO: 52016 - DNA, 20 bp, synthetic construct
  misc_feature 1..20: note = chemically synthesized
  source 1..20: mol_type = other DNA
ccagcttttattactagggc

SEQ ID NO: 52017 - DNA, 20 bp, synthetic construct
  misc_feature 1..20: note = chemically synthesized
  source 1..20: mol_type = other DNA
taattaattcaaacttcaaa

SEQ ID NO: 52018 - DNA, 20 bp, synthetic construct
  misc_feature 1..20: note = chemically synthesized
  source 1..20: mol_type = other DNA
tattaaggaagctgttaata

SEQ ID NO: 52019 - DNA, 20 bp, synthetic construct
  misc_feature 1..20: note = chemically synthesized
  source 1..20: mol_type = other DNA
ctaattcttaaatcctctag

SEQ ID NO: 52020 - DNA, 20 bp, synthetic construct
  misc_feature 1..20: note = chemically synthesized
  source 1..20: mol_type = other DNA
gaattaactaatactataaa

SEQ ID NO: 52021 - DNA, 20 bp, synthetic construct
  misc_feature 1..20: note = chemically synthesized
  source 1..20: mol_type = other DNA
actaatactataaaatgggt

SEQ ID NO: 52022 - DNA, 20 bp, synthetic construct
  misc_feature 1..20: note = chemically synthesized
  source 1..20: mol_type = other DNA
ttttataacaactggtaaga

SEQ ID NO: 52023 - DNA, 20 bp, synthetic construct
  misc_feature 1..20: note = chemically synthesized
  source 1..20: mol_type = other DNA
acaattacgtctgtgttata

SEQ ID NO: 52024 - DNA, 20 bp, synthetic construct
  misc_feature 1..20: note = chemically synthesized
  source 1..20: mol_type = other DNA
gacacttacgttcctgataa

SEQ ID NO: 52025 - DNA, 20 bp, synthetic construct
  misc_feature 1..20: note = chemically synthesized
  source 1..20: mol_type = other DNA
tccagatttctaataccaca

SEQ ID NO: 52026 - DNA, 20 bp, synthetic construct
  misc_feature 1..20: note = chemically synthesized
  source 1..20: mol_type = other DNA
tctctacacccagggcaccg

SEQ ID NO: 52027 - DNA, 20 bp, synthetic construct
  misc_feature 1..20: note = chemically synthesized
  source 1..20: mol_type = other DNA
ctttgaccatcagaggacac

SEQ ID NO: 52028 - DNA, 20 bp, synthetic construct
  misc_feature 1..20: note = chemically synthesized
  source 1..20: mol_type = other DNA
cacttggattcaccggtgcc

SEQ ID NO: 52029 - DNA, 20 bp, synthetic construct
  misc_feature 1..20: note = chemically synthesized
  source 1..20: mol_type = other DNA
gagaagttaacaaaattgat

SEQ ID NO: 52030 - DNA, 20 bp, synthetic construct
  misc_feature 1..20: note = chemically synthesized
  source 1..20: mol_type = other DNA
aacaaaattgatcagagtga

SEQ ID NO: 52031 - DNA, 20 bp, synthetic construct
  misc_feature 1..20: note = chemically synthesized
  source 1..20: mol_type = other DNA
ttagaaatctggagcgaaac

SEQ ID NO: 52032 - DNA, 20 bp, synthetic construct
  misc_feature 1..20: note = chemically synthesized
  source 1..20: mol_type = other DNA
gacgtaattgtttccaaagc

SEQ ID NO: 52033 - DNA, 20 bp, synthetic construct
  misc_feature 1..20: note = chemically synthesized
  source 1..20: mol_type = other DNA
cagacacactgctatcaacc

SEQ ID NO: 52034 - DNA, 20 bp, synthetic construct
  misc_feature 1..20: note = chemically synthesized
  source 1..20: mol_type = other DNA
atcaaccagggatgtgtata

SEQ ID NO: 52035 - DNA, 20 bp, synthetic construct
  misc_feature 1..20: note = chemically synthesized
  source 1..20: mol_type = other DNA
gctttgttaaaagtctccat

SEQ ID NO: 52036 - DNA, 20 bp, synthetic construct
  misc_feature 1..20: note = chemically synthesized
  source 1..20: mol_type = other DNA
gttaaaagtctccatttgag

SEQ ID NO: 52037 - DNA, 20 bp, synthetic construct
  misc_feature 1..20: note = chemically synthesized
  source 1..20: mol_type = other DNA
agtattagttaattcttcta

SEQ ID NO: 52038 - DNA, 20 bp, synthetic construct
  misc_feature 1..20: note = chemically synthesized
  source 1..20: mol_type = other DNA
ttaattcttctagaggattt

SEQ ID NO: 52039 - DNA, 20 bp, synthetic construct
  misc_feature 1..20: note = chemically synthesized
  source 1..20: mol_type = other DNA
ttaagaattagatatctgac

SEQ ID NO: 52040 - DNA, 20 bp, synthetic construct
  misc_feature 1..20: note = chemically synthesized
  source 1..20: mol_type = other DNA
gattaatcaataaatacgtt

SEQ ID NO: 52041 - DNA, 20 bp, synthetic construct
  misc_feature 1..20: note = chemically synthesized
  source 1..20: mol_type = other DNA
gttttgaataactatagggc

SEQ ID NO: 52042 - DNA, 20 bp, synthetic construct
  misc_feature 1..20: note = chemically synthesized
  source 1..20: mol_type = other DNA
cccccaaatacattttatgg

SEQ ID NO: 52043 - DNA, 20 bp, synthetic construct
  misc_feature 1..20: note = chemically synthesized
  source 1..20: mol_type = other DNA
aatgcaccaaagcaatgagg

SEQ ID NO: 52044 - DNA, 20 bp, synthetic construct
  misc_feature 1..20: note = chemically synthesized
  source 1..20: mol_type = other DNA
aagcaatgaggtagaatgct

SEQ ID NO: 52045 - DNA, 20 bp, synthetic construct
  misc_feature 1..20: note = chemically synthesized
  source 1..20: mol_type = other DNA
aacttcattctttttgaagt

SEQ ID NO: 52046 - DNA, 20 bp, synthetic construct
  misc_feature 1..20: note = chemically synthesized
  source 1..20: mol_type = other DNA
aattatattaaaaatagatg

SEQ ID NO: 52047 - DNA, 20 bp, synthetic construct
  misc_feature 1..20: note = chemically synthesized
  source 1..20: mol_type = other DNA
agctggttggcaaagctgga

SEQ ID NO: 52048 - DNA, 20 bp, synthetic construct
  misc_feature 1..20: note = chemically synthesized
  source 1..20: mol_type = other DNA
tcacttctacttcatttagc

SEQ ID NO: 52049 - DNA, 20 bp, synthetic construct
  misc_feature 1..20: note = chemically synthesized
  source 1..20: mol_type = other DNA
ttagcgtgaatcttaaatgt

SEQ ID NO: 52050 - DNA, 20 bp, synthetic construct
  misc_feature 1..20: note = chemically synthesized
  source 1..20: mol_type = other DNA
gtgaatcttaaatgtaggaa

SEQ ID NO: 52051 - DNA, 20 bp, synthetic construct
  misc_feature 1..20: note = chemically synthesized
  source 1..20: mol_type = other DNA
cgatgagaagccatcctgcc

SEQ ID NO: 52052 - DNA, 20 bp, synthetic construct
  misc_feature 1..20: note = chemically synthesized
  source 1..20: mol_type = other DNA
gagaagccatcctgccaaga

SEQ ID NO: 52053 - DNA, 20 bp, synthetic construct
  misc_feature 1..20: note = chemically synthesized
  source 1..20: mol_type = other DNA
ataattaattcaaacttcaa

SEQ ID NO: 52054 - DNA, 20 bp, synthetic construct
  misc_feature 1..20: note = chemically synthesized
  source 1..20: mol_type = other DNA
tctgtttcctcagatagatg

SEQ ID NO: 52055 - DNA, 20 bp, synthetic construct
  misc_feature 1..20: note = chemically synthesized
  source 1..20: mol_type = other DNA
aagctgttaatactgaattt

SEQ ID NO: 52056 - DNA, 20 bp, synthetic construct
  misc_feature 1..20: note = chemically synthesized
  source 1..20: mol_type = other DNA
tctaattcttaaatcctcta

SEQ ID NO: 52057 - DNA, 20 bp, synthetic construct
  misc_feature 1..20: note = chemically synthesized
  source 1..20: mol_type = other DNA
tgatagcagtgtgtctggag

SEQ ID NO: 52058 - DNA, 20 bp, synthetic construct
  misc_feature 1..20: note = chemically synthesized
  source 1..20: mol_type = other DNA
ctccagatttctaataccac

SEQ ID NO: 52059 - DNA, 20 bp, synthetic construct
  misc_feature 1..20: note = chemically synthesized
  source 1..20: mol_type = other DNA
caatgtggccgtgcatgtgt

SEQ ID NO: 52060 - DNA, 20 bp, synthetic construct
  misc_feature 1..20: note = chemically synthesized
  source 1..20: mol_type = other DNA
aggatttattctttgtggta

SEQ ID NO: 52061 - DNA, 20 bp, synthetic construct
  misc_feature 1..20: note = chemically synthesized
  source 1..20: mol_type = other DNA
attagaaatctggagcgaaa

SEQ ID NO: 52062 - DNA, 20 bp, synthetic construct
  misc_feature 1..20: note = chemically synthesized
  source 1..20: mol_type = other DNA
agacgtaattgtttccaaag

SEQ ID NO: 52063 - DNA, 20 bp, synthetic construct
  misc_feature 1..20: note = chemically synthesized
  source 1..20: mol_type = other DNA
tgtgtataatgaattttaag

SEQ ID NO: 52064 - DNA, 20 bp, synthetic construct
  misc_feature 1..20: note = chemically synthesized
  source 1..20: mol_type = other DNA
gttaattcttctagaggatt

SEQ ID NO: 52065 - DNA, 20 bp, synthetic construct
  misc_feature 1..20: note = chemically synthesized
  source 1..20: mol_type = other DNA
tttaagaattagatatctga

SEQ ID NO: 52066 - DNA, 20 bp, synthetic construct
  misc_feature 1..20: note = chemically synthesized
  source 1..20: mol_type = other DNA
cgttttgaataactataggg

SEQ ID NO: 52067 - DNA, 20 bp, synthetic construct
  misc_feature 1..20: note = chemically synthesized
  source 1..20: mol_type = other DNA
taatgcaccaaagcaatgag

SEQ ID NO: 52068 - DNA, 20 bp, synthetic construct
  misc_feature 1..20: note = chemically synthesized
  source 1..20: mol_type = other DNA
aaatgtaggaatgggatgtc

SEQ ID NO: 52069 - DNA, 20 bp, synthetic construct
  misc_feature 1..20: note = chemically synthesized
  source 1..20: mol_type = other DNA
acgatgagaagccatcctgc

SEQ ID NO: 52070 - DNA, 20 bp, synthetic construct
  misc_feature 1..20: note = chemically synthesized
  source 1..20: mol_type = other DNA
attctggccctatagttatt

SEQ ID NO: 52071 - DNA, 20 bp, synthetic construct
  misc_feature 1..20: note = chemically synthesized
  source 1..20: mol_type = other DNA
aacaactaaaatgatctcag

SEQ ID NO: 52072 - DNA, 20 bp, synthetic construct
  misc_feature 1..20: note = chemically synthesized
  source 1..20: mol_type = other DNA
taagtcaataatcagaatca

SEQ ID NO: 52073 - DNA, 20 bp, synthetic construct
  misc_feature 1..20: note = chemically synthesized
  source 1..20: mol_type = other DNA
tcagaatcagcaggtttgca

SEQ ID NO: 52074 - DNA, 20 bp, synthetic construct
  misc_feature 1..20: note = chemically synthesized
  source 1..20: mol_type = other DNA
agtccactcattcttggcag

SEQ ID NO: 52075 - DNA, 20 bp, synthetic construct
  misc_feature 1..20: note = chemically synthesized
  source 1..20: mol_type = other DNA
tctgaggctggccctacggt

SEQ ID NO: 52076 - DNA, 20 bp, synthetic construct
  misc_feature 1..20: note = chemically synthesized
  source 1..20: mol_type = other DNA
gtgacatcccattcctacat

SEQ ID NO: 52077 - DNA, 20 bp, synthetic construct
  misc_feature 1..20: note = chemically synthesized
  source 1..20: mol_type = other DNA
atgaagtagaagtgactcct

SEQ ID NO: 52078 - DNA, 20 bp, synthetic construct
  misc_feature 1..20: note = chemically synthesized
  source 1..20: mol_type = other DNA
gactccttccagctttgcca

SEQ ID NO: 52079 - DNA, 20 bp, synthetic construct
  misc_feature 1..20: note = chemically synthesized
  source 1..20: mol_type = other DNA
tcaaaaagaatgaagttcca

SEQ ID NO: 52080 - DNA, 20 bp, synthetic construct
  misc_feature 1..20: note = chemically synthesized
  source 1..20: mol_type = other DNA
gaactctgagcattctacct

SEQ ID NO: 52081 - DNA, 20 bp, synthetic construct
  misc_feature 1..20: note = chemically synthesized
  source 1..20: mol_type = other DNA
tacctcattgctttggtgca

SEQ ID NO: 52082 - DNA, 20 bp, synthetic construct
  misc_feature 1..20: note = chemically synthesized
  source 1..20: mol_type = other DNA
aggtttgtaatatctggtac

SEQ ID NO: 52083 - DNA, 20 bp, synthetic construct
  misc_feature 1..20: note = chemically synthesized
  source 1..20: mol_type = other DNA
gtatttgggggacaaactgc

SEQ ID NO: 52084 - DNA, 20 bp, synthetic construct
  misc_feature 1..20: note = chemically synthesized
  source 1..20: mol_type = other DNA
atagttattcaaaacgtatt

SEQ ID NO: 52085 - DNA, 20 bp, synthetic construct
  misc_feature 1..20: note = chemically synthesized
  source 1..20: mol_type = other DNA
tatttattgattaatcttta

SEQ ID NO: 52086 - DNA, 20 bp, synthetic construct
  misc_feature 1..20: note = chemically synthesized
  source 1..20: mol_type = other DNA
actaaaatgatctcaggaaa

SEQ ID NO: 52087 - DNA, 20 bp, synthetic construct
  misc_feature 1..20: note = chemically synthesized
  source 1..20: mol_type = other DNA
tgtctggaggcagaaaccat

SEQ ID NO: 52088 - DNA, 20 bp, synthetic construct
  misc_feature 1..20: note = chemically synthesized
  source 1..20: mol_type = other DNA
taatgggatcagtgtgtaat

SEQ ID NO: 52089 - DNA, 20 bp, synthetic construct
  misc_feature 1..20: note = chemically synthesized
  source 1..20: mol_type = other DNA
gtgtgtaattcttgtttcgc

SEQ ID NO: 52090 - DNA, 20 bp, synthetic construct
  misc_feature 1..20: note = chemically synthesized
  source 1..20: mol_type = other DNA
actttgaccatcagaggaca

SEQ ID NO: 52091 - DNA, 20 bp, synthetic construct
  misc_feature 1..20: note = chemically synthesized
  source 1..20: mol_type = other DNA
taacaaaattgatcagagtg

SEQ ID NO: 52092 - DNA, 20 bp, synthetic construct
  misc_feature 1..20: note = chemically synthesized
  source 1..20: mol_type = other DNA
aacgtaagtgtcgacaatta

SEQ ID NO: 52093 - DNA, 20 bp, synthetic construct
  misc_feature 1..20: note = chemically synthesized
  source 1..20: mol_type = other DNA
actcagtataacacagacgt

SEQ ID NO: 52094 - DNA, 20 bp, synthetic construct
  misc_feature 1..20: note = chemically synthesized
  source 1..20: mol_type = other DNA
gtaattgtttccaaagcaag

SEQ ID NO: 52095 - DNA, 20 bp, synthetic construct
  misc_feature 1..20: note = chemically synthesized
  source 1..20: mol_type = other DNA
aaaataggtcccctgagaac

SEQ ID NO: 52096 - DNA, 20 bp, synthetic construct
  misc_feature 1..20: note = chemically synthesized
  source 1..20: mol_type = other DNA
tgtaccatacatagggccaa

SEQ ID NO: 52097 - DNA, 20 bp, synthetic construct
  misc_feature 1..20: note = chemically synthesized
  source 1..20: mol_type = other DNA
tagtattagttaattcttct

SEQ ID NO: 52098 - DNA, 20 bp, synthetic construct
  misc_feature 1..20: note = chemically synthesized
  source 1..20: mol_type = other DNA
atattgttcactaagccttt

SEQ ID NO: 52099 - DNA, 20 bp, synthetic construct
  misc_feature 1..20: note = chemically synthesized
  source 1..20: mol_type = other DNA
ttttaaagattaatcaataa

SEQ ID NO: 52100 - DNA, 20 bp, synthetic construct
  misc_feature 1..20: note = chemically synthesized
  source 1..20: mol_type = other DNA
agggccagaatataatctcc

SEQ ID NO: 52101 - DNA, 20 bp, synthetic construct
  misc_feature 1..20: note = chemically synthesized
  source 1..20: mol_type = other DNA
ttttctgaaaattcagtatt

SEQ ID NO: 52102 - DNA, 20 bp, synthetic construct
  misc_feature 1..20: note = chemically synthesized
  source 1..20: mol_type = other DNA
cagtggaacttcattctttt

SEQ ID NO: 52103 - DNA, 20 bp, synthetic construct
  misc_feature 1..20: note = chemically synthesized
  source 1..20: mol_type = other DNA
tgtgatggctgctcccagcc

SEQ ID NO: 52104 - DNA, 20 bp, synthetic construct
  misc_feature 1..20: note = chemically synthesized
  source 1..20: mol_type = other DNA
tactcacttctcctgagcta

SEQ ID NO: 52105 - DNA, 20 bp, synthetic construct
  misc_feature 1..20: note = chemically synthesized
  source 1..20: mol_type = other DNA
tgccaatctgactgcaaacc

SEQ ID NO: 52106 - DNA, 20 bp, synthetic construct
  misc_feature 1..20: note = chemically synthesized
  source 1..20: mol_type = other DNA
tctgactgcaaacctgctga

SEQ ID NO: 52107 - DNA, 22 bp, synthetic construct
  misc_feature 1..22: note = chemically synthesized
  source 1..22: mol_type = other DNA
actaagtcaataatcagaatca

SEQ ID NO: 52108 - DNA, 22 bp, synthetic construct
  misc_feature 1..22: note = chemically synthesized
  source 1..22: mol_type = other DNA
agtcaataatcagaatcagcag

SEQ ID NO: 52109 - DNA, 22 bp, synthetic construct
  misc_feature 1..22: note = chemically synthesized
  source 1..22: mol_type = other DNA
gcagtcagattggcagggataa

SEQ ID NO: 52110 - DNA, 22 bp, synthetic construct
  misc_feature 1..22: note = chemically synthesized
  source 1..22: mol_type = other DNA
cagtcagattggcagggataag

SEQ ID NO: 52111 - DNA, 22 bp, synthetic construct
  misc_feature 1..22: note = chemically synthesized
  source 1..22: mol_type = other DNA
gcagggataagcagcctagctc

SEQ ID NO: 52112 - DNA, 22 bp, synthetic construct
  misc_feature 1..22: note = chemically synthesized
  source 1..22: mol_type = other DNA
gctcaggagaagtgagtataaa

SEQ ID NO: 52113 - DNA, 22 bp, synthetic construct
  misc_feature 1..22: note = chemically synthesized
  source 1..22: mol_type = other DNA
aggagaagtgagtataaaagcc

SEQ ID NO: 52114 - DNA, 22 bp, synthetic construct
  misc_feature 1..22: note = chemically synthesized
  source 1..22: mol_type = other DNA
ggagcagccatcacagaagtcc

SEQ ID NO: 52115 - DNA, 22 bp, synthetic construct
  misc_feature 1..22: note = chemically synthesized
  source 1..22: mol_type = other DNA
attcttggcaggatggcttctc

SEQ ID NO: 52116 - DNA, 22 bp, synthetic construct
  misc_feature 1..22: note = chemically synthesized
  source 1..22: mol_type = other DNA
ttggcaggatggcttctcatcg

SEQ ID NO: 52117 - DNA, 22 bp, synthetic construct
  misc_feature 1..22: note = chemically synthesized
  source 1..22: mol_type = other DNA
ggcaggatggcttctcatcgtc

SEQ ID NO: 52118 - DNA, 22 bp, synthetic construct
  misc_feature 1..22: note = chemically synthesized
  source 1..22: mol_type = other DNA
gcaggatggcttctcatcgtct

SEQ ID NO: 52119 - DNA, 22 bp, synthetic construct
  misc_feature 1..22: note = chemically synthesized
  source 1..22: mol_type = other DNA
ctcatcgtctgctcctcctctg

SEQ ID NO: 52120 - DNA, 22 bp, synthetic construct
  misc_feature 1..22: note = chemically synthesized
  source 1..22: mol_type = other DNA
tcatcgtctgctcctcctctgc

SEQ ID NO: 52121 - DNA, 22 bp, synthetic construct
  misc_feature 1..22: note = chemically synthesized
  source 1..22: mol_type = other DNA
atcgtctgctcctcctctgcct

SEQ ID NO: 52122 - DNA, 22 bp, synthetic construct
  misc_feature 1..22: note = chemically synthesized
  source 1..22: mol_type = other DNA
ctcctcctctgccttgctggac

SEQ ID NO: 52123 - DNA, 22 bp, synthetic construct
  misc_feature 1..22: note = chemically synthesized
  source 1..22: mol_type = other DNA
ctcctctgccttgctggactgg

SEQ ID NO: 52124 - DNA, 22 bp, synthetic construct
  misc_feature 1..22: note = chemically synthesized
  source 1..22: mol_type = other DNA
ctctgccttgctggactggtat

SEQ ID NO: 52125 - DNA, 22 bp, synthetic construct
  misc_feature 1..22: note = chemically synthesized
  source 1..22: mol_type = other DNA
tgccttgctggactggtatttg

SEQ ID NO: 52126 - DNA, 22 bp, synthetic construct
  misc_feature 1..22: note = chemically synthesized
  source 1..22: mol_type = other DNA
ccttgctggactggtatttgtg

SEQ ID NO: 52127 - DNA, 22 bp, synthetic construct
  misc_feature 1..22: note = chemically synthesized
  source 1..22: mol_type = other DNA
gctggactggtatttgtgtctg

SEQ ID NO: 52128 - DNA, 22 bp, synthetic construct
  misc_feature 1..22: note = chemically synthesized
  source 1..22: mol_type = other DNA
ctggactggtatttgtgtctga

SEQ ID NO: 52129 - DNA, 22 bp, synthetic construct
  misc_feature 1..22: note = chemically synthesized
  source 1..22: mol_type = other DNA
gactggtatttgtgtctgaggc

SEQ ID NO: 52130 - DNA, 22 bp, synthetic construct
  misc_feature 1..22: note = chemically synthesized
  source 1..22: mol_type = other DNA
gtatttgtgtctgaggctggcc

SEQ ID NO: 52131 - DNA, 22 bp, synthetic construct
  misc_feature 1..22: note = chemically synthesized
  source 1..22: mol_type = other DNA
gtgtctgaggctggccctacgg

SEQ ID NO: 52132 - DNA, 22 bp, synthetic construct
  misc_feature 1..22: note = chemically synthesized
  source 1..22: mol_type = other DNA
tgtctgaggctggccctacggt

SEQ ID NO: 52133 - DNA, 22 bp, synthetic construct
  misc_feature 1..22: note = chemically synthesized
  source 1..22: mol_type = other DNA
aggctggccctacggtgagtgt

SEQ ID NO: 52134 - DNA, 22 bp, synthetic construct
  misc_feature 1..22: note = chemically synthesized
  source 1..22: mol_type = other DNA
gccctacggtgagtgtttctgt

SEQ ID NO: 52135 - DNA, 22 bp, synthetic construct
  misc_feature 1..22: note = chemically synthesized
  source 1..22: mol_type = other DNA
cggtgagtgtttctgtgacatc

SEQ ID NO: 52136 - DNA, 22 bp, synthetic construct
  misc_feature 1..22: note = chemically synthesized
  source 1..22: mol_type = other DNA
ctgtgacatcccattcctacat

SEQ ID NO: 52137 - DNA, 22 bp, synthetic construct
  misc_feature 1..22: note = chemically synthesized
  source 1..22: mol_type = other DNA
tgtgacatcccattcctacatt

SEQ ID NO: 52138 - DNA, 22 bp, synthetic construct
  misc_feature 1..22: note = chemically synthesized
  source 1..22: mol_type = other DNA
tgacatcccattcctacattta

SEQ ID NO: 52139 - DNA, 22 bp, synthetic construct
  misc_feature 1..22: note = chemically synthesized
  source 1..22: mol_type = other DNA
ctacatttaagattcacgctaa

SEQ ID NO: 52140 - DNA, 22 bp, synthetic construct
  misc_feature 1..22: note = chemically synthesized
  source 1..22: mol_type = other DNA
catttaagattcacgctaaatg

SEQ ID NO: 52141 - DNA, 22 bp, synthetic construct
  misc_feature 1..22: note = chemically synthesized
  source 1..22: mol_type = other DNA
aagattcacgctaaatgaagta

SEQ ID NO: 52142 - DNA, 22 bp, synthetic construct
  misc_feature 1..22: note = chemically synthesized
  source 1..22: mol_type = other DNA
agattcacgctaaatgaagtag

SEQ ID NO: 52143 - DNA, 22 bp, synthetic construct
  misc_feature 1..22: note = chemically synthesized
  source 1..22: mol_type = other DNA
acgctaaatgaagtagaagtga

SEQ ID NO: 52144 - DNA, 22 bp, synthetic construct
  misc_feature 1..22: note = chemically synthesized
  source 1..22: mol_type = other DNA
aatgaagtagaagtgactcctt

SEQ ID NO: 52145 - DNA, 22 bp, synthetic construct
  misc_feature 1..22: note = chemically synthesized
  source 1..22: mol_type = other DNA
cttccagctttgccaaccagct

SEQ ID NO: 52146 - DNA, 22 bp, synthetic construct
  misc_feature 1..22: note = chemically synthesized
  source 1..22: mol_type = other DNA
ccagctttgccaaccagctttt

SEQ ID NO: 52147 - DNA, 22 bp, synthetic construct
  misc_feature 1..22: note = chemically synthesized
  source 1..22: mol_type = other DNA
cagctttgccaaccagctttta

SEQ ID NO: 52148 - DNA, 22 bp, synthetic construct
  misc_feature 1..22: note = chemically synthesized
  source 1..22: mol_type = other DNA
tgccaaccagcttttattacta

SEQ ID NO: 52149 - DNA, 22 bp, synthetic construct
  misc_feature 1..22: note = chemically synthesized
  source 1..22: mol_type = other DNA
gccaaccagcttttattactag

SEQ ID NO: 52150 - DNA, 22 bp, synthetic construct
  misc_feature 1..22: note = chemically synthesized
  source 1..22: mol_type = other DNA
ccaaccagcttttattactagg

SEQ ID NO: 52151 - DNA, 22 bp, synthetic construct
  misc_feature 1..22: note = chemically synthesized
  source 1..22: mol_type = other DNA
ttattactagggcaagggtacc

SEQ ID NO: 52152 - DNA, 22 bp, synthetic construct
  misc_feature 1..22: note = chemically synthesized
  source 1..22: mol_type = other DNA
tattactagggcaagggtaccc

SEQ ID NO: 52153 - DNA, 22 bp, synthetic construct
  misc_feature 1..22: note = chemically synthesized
  source 1..22: mol_type = other DNA
attactagggcaagggtaccca

SEQ ID NO: 52154 - DNA, 22 bp, synthetic construct
  misc_feature 1..22: note = chemically synthesized
  source 1..22: mol_type = other DNA
ttactagggcaagggtacccag

SEQ ID NO: 52155 - DNA, 22 bp, synthetic construct
  misc_feature 1..22: note = chemically synthesized
  source 1..22: mol_type = other DNA
ctagggcaagggtacccagcat

SEQ ID NO: 52156 - DNA, 22 bp, synthetic construct
  misc_feature 1..22: note = chemically synthesized
  source 1..22: mol_type = other DNA
gggcaagggtacccagcatcta

SEQ ID NO: 52157 - DNA, 22 bp, synthetic construct
  misc_feature 1..22: note = chemically synthesized
  source 1..22: mol_type = other DNA
tttttaatataattaattcaaa

SEQ ID NO: 52158 - DNA, 22 bp, synthetic construct
  misc_feature 1..22: note = chemically synthesized
  source 1..22: mol_type = other DNA
ttaatataattaattcaaactt

SEQ ID NO: 52159 - DNA, 22 bp, synthetic construct
  misc_feature 1..22: note = chemically synthesized
  source 1..22: mol_type = other DNA
taatataattaattcaaacttc

SEQ ID NO: 52160 - DNA, 22 bp, synthetic construct
  misc_feature 1..22: note = chemically synthesized
  source 1..22: mol_type = other DNA
aatataattaattcaaacttca

SEQ ID NO: 52161 - DNA, 22 bp, synthetic construct
  misc_feature 1..22: note = chemically synthesized
  source 1..22: mol_type = other DNA
atataattaattcaaacttcaa

SEQ ID NO: 52162 - DNA, 22 bp, synthetic construct
  misc_feature 1..22: note = chemically synthesized
  source 1..22: mol_type = other DNA
attcaaacttcaaaaagaatga

SEQ ID NO: 52163 - DNA, 22 bp, synthetic construct
  misc_feature 1..22: note = chemically synthesized
  source 1..22: mol_type = other DNA
aaacttcaaaaagaatgaagtt

SEQ ID NO: 52164 - DNA, 22 bp, synthetic construct
  misc_feature 1..22: note = chemically synthesized
  source 1..22: mol_type = other DNA
caaaaagaatgaagttccactg

SEQ ID NO: 52165 - DNA, 22 bp, synthetic construct
  misc_feature 1..22: note = chemically synthesized
  source 1..22: mol_type = other DNA
aaaaagaatgaagttccactga

SEQ ID NO: 52166 - DNA, 22 bp, synthetic construct
  misc_feature 1..22: note = chemically synthesized
  source 1..22: mol_type = other DNA
cactgagcttactgagctggga

SEQ ID NO: 52167 - DNA, 22 bp, synthetic construct
  misc_feature 1..22: note = chemically synthesized
  source 1..22: mol_type = other DNA
agcttactgagctgggacttga

SEQ ID NO: 52168 - DNA, 22 bp, synthetic construct
  misc_feature 1..22: note = chemically synthesized
  source 1..22: mol_type = other DNA
actgagctgggacttgaactct

SEQ ID NO: 52169 - DNA, 22 bp, synthetic construct
  misc_feature 1..22: note = chemically synthesized
  source 1..22: mol_type = other DNA
ctgagctgggacttgaactctg

SEQ ID NO: 52170 - DNA, 22 bp, synthetic construct
  misc_feature 1..22: note = chemically synthesized
  source 1..22: mol_type = other DNA
agctgggacttgaactctgagc

SEQ ID NO: 52171 - DNA, 22 bp, synthetic construct
  misc_feature 1..22: note = chemically synthesized
  source 1..22: mol_type = other DNA
ggacttgaactctgagcattct

SEQ ID NO: 52172 - DNA, 22 bp, synthetic construct
  misc_feature 1..22: note = chemically synthesized
  source 1..22: mol_type = other DNA
gaactctgagcattctacctca

SEQ ID NO: 52173 - DNA, 22 bp, synthetic construct
  misc_feature 1..22: note = chemically synthesized
  source 1..22: mol_type = other DNA
aactctgagcattctacctcat

SEQ ID NO: 52174 - DNA, 22 bp, synthetic construct
  misc_feature 1..22: note = chemically synthesized
  source 1..22: mol_type = other DNA
tgagcattctacctcattgctt

SEQ ID NO: 52175 - DNA, 22 bp, synthetic construct
  misc_feature 1..22: note = chemically synthesized
  source 1..22: mol_type = other DNA
agcattctacctcattgctttg

SEQ ID NO: 52176 - DNA, 22 bp, synthetic construct
  misc_feature 1..22: note = chemically synthesized
  source 1..22: mol_type = other DNA
tacctcattgctttggtgcatt

SEQ ID NO: 52177 - DNA, 22 bp, synthetic construct
  misc_feature 1..22: note = chemically synthesized
  source 1..22: mol_type = other DNA
cctcattgctttggtgcattag

SEQ ID NO: 52178 - DNA, 22 bp, synthetic construct
  misc_feature 1..22: note = chemically synthesized
  source 1..22: mol_type = other DNA
attgctttggtgcattaggttt

SEQ ID NO: 52179 - DNA, 22 bp, synthetic construct
  misc_feature 1..22: note = chemically synthesized
  source 1..22: mol_type = other DNA
ctttggtgcattaggtttgtaa

SEQ ID NO: 52180 - DNA, 22 bp, synthetic construct
  misc_feature 1..22: note = chemically synthesized
  source 1..22: mol_type = other DNA
tggtgcattaggtttgtaatat

SEQ ID NO: 52181 - DNA, 22 bp, synthetic construct
  misc_feature 1..22: note = chemically synthesized
  source 1..22: mol_type = other DNA
ggtgcattaggtttgtaatatc

SEQ ID NO: 52182 - DNA, 22 bp, synthetic construct
  misc_feature 1..22: note = chemically synthesized
  source 1..22: mol_type = other DNA
gtgcattaggtttgtaatatct

SEQ ID NO: 52183 - DNA, 22 bp, synthetic construct
  misc_feature 1..22: note = chemically synthesized
  source 1..22: mol_type = other DNA
ggtttgtaatatctggtacctc

SEQ ID NO: 52184 - DNA, 22 bp, synthetic construct
  misc_feature 1..22: note = chemically synthesized
  source 1..22: mol_type = other DNA
gtaatatctggtacctctgttt

SEQ ID NO: 52185 - DNA, 22 bp, synthetic construct
  misc_feature 1..22: note = chemically synthesized
  source 1..22: mol_type = other DNA
taatatctggtacctctgtttc

SEQ ID NO: 52186 - DNA, 22 bp, synthetic construct
  misc_feature 1..22: note = chemically synthesized
  source 1..22: mol_type = other DNA
gtacctctgtttcctcagatag

SEQ ID NO: 52187 - DNA, 22 bp, synthetic construct
  misc_feature 1..22: note = chemically synthesized
  source 1..22: mol_type = other DNA
tgtttcctcagatagatgatag

SEQ ID NO: 52188 - DNA, 22 bp, synthetic construct
  misc_feature 1..22: note = chemically synthesized
  source 1..22: mol_type = other DNA
tttcctcagatagatgatagaa

SEQ ID NO: 52189 - DNA, 22 bp, synthetic construct
  misc_feature 1..22: note = chemically synthesized
  source 1..22: mol_type = other DNA
cctcagatagatgatagaaata

SEQ ID NO: 52190 - DNA, 22 bp, synthetic construct
  misc_feature 1..22: note = chemically synthesized
  source 1..22: mol_type = other DNA
ctcagatagatgatagaaataa

SEQ ID NO: 52191 - DNA, 22 bp, synthetic construct
  misc_feature 1..22: note = chemically synthesized
  source 1..22: mol_type = other DNA
agatagatgatagaaataaaga

SEQ ID NO: 52192 - DNA, 22 bp, synthetic construct
  misc_feature 1..22: note = chemically synthesized
  source 1..22: mol_type = other DNA
aggaagctgttaatactgaatt

SEQ ID NO: 52193 - DNA, 22 bp, synthetic construct
  misc_feature 1..22: note = chemically synthesized
  source 1..22: mol_type = other DNA
ttaatactgaattttcagaaaa

SEQ ID NO: 52194 - DNA, 22 bp, synthetic construct
  misc_feature 1..22: note = chemically synthesized
  source 1..22: mol_type = other DNA
atactgaattttcagaaaagta

SEQ ID NO: 52195 - DNA, 22 bp, synthetic construct
  misc_feature 1..22: note = chemically synthesized
  source 1..22: mol_type = other DNA
aattttcagaaaagtatccctc

SEQ ID NO: 52196 - DNA, 22 bp, synthetic construct
  misc_feature 1..22: note = chemically synthesized
  source 1..22: mol_type = other DNA
tcagaaaagtatccctccataa

SEQ ID NO: 52197 - DNA, 22 bp, synthetic construct
  misc_feature 1..22: note = chemically synthesized
  source 1..22: mol_type = other DNA
cagaaaagtatccctccataaa

SEQ ID NO: 52198 - DNA, 22 bp, synthetic construct
  misc_feature 1..22: note = chemically synthesized
  source 1..22: mol_type = other DNA
agaaaagtatccctccataaaa

SEQ ID NO: 52199 - DNA, 22 bp, synthetic construct
  misc_feature 1..22: note = chemically synthesized
  source 1..22: mol_type = other DNA
cataaaatgtatttgggggaca

SEQ ID NO: 52200 - DNA, 22 bp, synthetic construct
  misc_feature 1..22: note = chemically synthesized
  source 1..22: mol_type = other DNA
gggggacaaactgcaggagatt

SEQ ID NO: 52201 - DNA, 22 bp, synthetic construct
  misc_feature 1..22: note = chemically synthesized
  source 1..22: mol_type = other DNA
ggggacaaactgcaggagatta

SEQ ID NO: 52202 - DNA, 22 bp, synthetic construct
  misc_feature 1..22: note = chemically synthesized
  source 1..22: mol_type = other DNA
caggagattatattctggccct

SEQ ID NO: 52203 - DNA, 22 bp, synthetic construct
  misc_feature 1..22: note = chemically synthesized
  source 1..22: mol_type = other DNA
tattctggccctatagttattc

SEQ ID NO: 52204 - DNA, 22 bp, synthetic construct
  misc_feature 1..22: note = chemically synthesized
  source 1..22: mol_type = other DNA
tggccctatagttattcaaaac

SEQ ID NO: 52205 - DNA, 22 bp, synthetic construct
  misc_feature 1..22: note = chemically synthesized
  source 1..22: mol_type = other DNA
gccctatagttattcaaaacgt

SEQ ID NO: 52206 - DNA, 22 bp, synthetic construct
  misc_feature 1..22: note = chemically synthesized
  source 1..22: mol_type = other DNA
tagttattcaaaacgtatttat

SEQ ID NO: 52207 - DNA, 22 bp, synthetic construct
  misc_feature 1..22: note = chemically synthesized
  source 1..22: mol_type = other DNA
ttcaaaacgtatttattgatta

SEQ ID NO: 52208 - DNA, 22 bp, synthetic construct
  misc_feature 1..22: note = chemically synthesized
  source 1..22: mol_type = other DNA
aaaacgtatttattgattaatc

SEQ ID NO: 52209 - DNA, 22 bp, synthetic construct
  misc_feature 1..22: note = chemically synthesized
  source 1..22: mol_type = other DNA
attgattaatctttaaaaggct

SEQ ID NO: 52210 - DNA, 22 bp, synthetic construct
  misc_feature 1..22: note = chemically synthesized
  source 1..22: mol_type = other DNA
ttgattaatctttaaaaggctt

SEQ ID NO: 52211 - DNA, 22 bp, synthetic construct
  misc_feature 1..22: note = chemically synthesized
  source 1..22: mol_type = other DNA
attaatctttaaaaggcttagt

SEQ ID NO: 52212 - DNA, 22 bp, synthetic construct
  misc_feature 1..22: note = chemically synthesized
  source 1..22: mol_type = other DNA
atctttaaaaggcttagtgaac

SEQ ID NO: 52213 - DNA, 22 bp, synthetic construct
  misc_feature 1..22: note = chemically synthesized
  source 1..22: mol_type = other DNA
taaaaggcttagtgaacaatat

SEQ ID NO: 52214 - DNA, 22 bp, synthetic construct
  misc_feature 1..22: note = chemically synthesized
  source 1..22: mol_type = other DNA
aaaaggcttagtgaacaatatt

SEQ ID NO: 52215 - DNA, 22 bp, synthetic construct
  misc_feature 1..22: note = chemically synthesized
  source 1..22: mol_type = other DNA
aaaggcttagtgaacaatattc

SEQ ID NO: 52216 - DNA, 22 bp, synthetic construct
  misc_feature 1..22: note = chemically synthesized
  source 1..22: mol_type = other DNA
agtgaacaatattctagtcaga

SEQ ID NO: 52217 - DNA, 22 bp, synthetic construct
  misc_feature 1..22: note = chemically synthesized
  source 1..22: mol_type = other DNA
gtgaacaatattctagtcagat

SEQ ID NO: 52218 - DNA, 22 bp, synthetic construct
  misc_feature 1..22: note = chemically synthesized
  source 1..22: mol_type = other DNA
tagtcagatatctaattcttaa

SEQ ID NO: 52219 - DNA, 22 bp, synthetic construct
  misc_feature 1..22: note = chemically synthesized
  source 1..22: mol_type = other DNA
gtcagatatctaattcttaaat

SEQ ID NO: 52220 - DNA, 22 bp, synthetic construct
  misc_feature 1..22: note = chemically synthesized
  source 1..22: mol_type = other DNA
attcttaaatcctctagaagaa

SEQ ID NO: 52221 - DNA, 22 bp, synthetic construct
  misc_feature 1..22: note = chemically synthesized
  source 1..22: mol_type = other DNA
ttaaatcctctagaagaattaa

SEQ ID NO: 52222 - DNA, 22 bp, synthetic construct
  misc_feature 1..22: note = chemically synthesized
  source 1..22: mol_type = other DNA
aaatcctctagaagaattaact

SEQ ID NO: 52223 - DNA, 22 bp, synthetic construct
  misc_feature 1..22: note = chemically synthesized
  source 1..22: mol_type = other DNA
aatcctctagaagaattaacta

SEQ ID NO: 52224 - DNA, 22 bp, synthetic construct
  misc_feature 1..22: note = chemically synthesized
  source 1..22: mol_type = other DNA
tagaagaattaactaatactat

SEQ ID NO: 52225 - DNA, 22 bp, synthetic construct
  misc_feature 1..22: note = chemically synthesized
  source 1..22: mol_type = other DNA
gaagaattaactaatactataa

SEQ ID NO: 52226 - DNA, 22 bp, synthetic construct
  misc_feature 1..22: note = chemically synthesized
  source 1..22: mol_type = other DNA
actaatactataaaatgggtct

SEQ ID NO: 52227 - DNA, 22 bp, synthetic construct
  misc_feature 1..22: note = chemically synthesized
  source 1..22: mol_type = other DNA
atactataaaatgggtctggat

SEQ ID NO: 52228 - DNA, 22 bp, synthetic construct
  misc_feature 1..22: note = chemically synthesized
  source 1..22: mol_type = other DNA
taaaatgggtctggatgtagtt

SEQ ID NO: 52229 - DNA, 22 bp, synthetic construct
  misc_feature 1..22: note = chemically synthesized
  source 1..22: mol_type = other DNA
gatgtagttctgacattatttt

SEQ ID NO: 52230 - DNA, 22 bp, synthetic construct
  misc_feature 1..22: note = chemically synthesized
  source 1..22: mol_type = other DNA
tgacattattttataacaactg

SEQ ID NO: 52231 - DNA, 22 bp, synthetic construct
  misc_feature 1..22: note = chemically synthesized
  source 1..22: mol_type = other DNA
acattattttataacaactggt

SEQ ID NO: 52232 - DNA, 22 bp, synthetic construct
  misc_feature 1..22: note = chemically synthesized
  source 1..22: mol_type = other DNA
ttttataacaactggtaagagg

SEQ ID NO: 52233 - DNA, 22 bp, synthetic construct
  misc_feature 1..22: note = chemically synthesized
  source 1..22: mol_type = other DNA
tataacaactggtaagagggag

SEQ ID NO: 52234 - DNA, 22 bp, synthetic construct
  misc_feature 1..22: note = chemically synthesized
  source 1..22: mol_type = other DNA
ataacaactggtaagagggagt

SEQ ID NO: 52235 - DNA, 22 bp, synthetic construct
  misc_feature 1..22: note = chemically synthesized
  source 1..22: mol_type = other DNA
taacaactggtaagagggagtg

SEQ ID NO: 52236 - DNA, 22 bp, synthetic construct
  misc_feature 1..22: note = chemically synthesized
  source 1..22: mol_type = other DNA
gtaagagggagtgactatagca

SEQ ID NO: 52237 - DNA, 22 bp, synthetic construct
  misc_feature 1..22: note = chemically synthesized
  source 1..22: mol_type = other DNA
tagcaacaactaaaatgatctc

SEQ ID NO: 52238 - DNA, 22 bp, synthetic construct
  misc_feature 1..22: note = chemically synthesized
  source 1..22: mol_type = other DNA
aaatgatctcaggaaaacctgt

SEQ ID NO: 52239 - DNA, 22 bp, synthetic construct
  misc_feature 1..22: note = chemically synthesized
  source 1..22: mol_type = other DNA
aggaaaacctgtttggccctat

SEQ ID NO: 52240 - DNA, 22 bp, synthetic construct
  misc_feature 1..22: note = chemically synthesized
  source 1..22: mol_type = other DNA
tttggccctatgtatggtacat

SEQ ID NO: 52241 - DNA, 22 bp, synthetic construct
  misc_feature 1..22: note = chemically synthesized
  source 1..22: mol_type = other DNA
ggccctatgtatggtacattac

SEQ ID NO: 52242 - DNA, 22 bp, synthetic construct
  misc_feature 1..22: note = chemically synthesized
  source 1..22: mol_type = other DNA
gccctatgtatggtacattaca

SEQ ID NO: 52243 - DNA, 22 bp, synthetic construct
  misc_feature 1..22: note = chemically synthesized
  source 1..22: mol_type = other DNA
tgtatggtacattacatctttt

SEQ ID NO: 52244 - DNA, 22 bp, synthetic construct
  misc_feature 1..22: note = chemically synthesized
  source 1..22: mol_type = other DNA
catcttttcagtaattccactc

SEQ ID NO: 52245 - DNA, 22 bp, synthetic construct
  misc_feature 1..22: note = chemically synthesized
  source 1..22: mol_type = other DNA
ttcagtaattccactcaaatgg

SEQ ID NO: 52246 - DNA, 22 bp, synthetic construct
  misc_feature 1..22: note = chemically synthesized
  source 1..22: mol_type = other DNA
tcagtaattccactcaaatgga

SEQ ID NO: 52247 - DNA, 22 bp, synthetic construct
  misc_feature 1..22: note = chemically synthesized
  source 1..22: mol_type = other DNA
cagtaattccactcaaatggag

SEQ ID NO: 52248 - DNA, 22 bp, synthetic construct
  misc_feature 1..22: note = chemically synthesized
  source 1..22: mol_type = other DNA
agtaattccactcaaatggaga

SEQ ID NO: 52249 - DNA, 22 bp, synthetic construct
  misc_feature 1..22: note = chemically synthesized
  source 1..22: mol_type = other DNA
cactcaaatggagacttttaac

SEQ ID NO: 52250 - DNA, 22 bp, synthetic construct
  misc_feature 1..22: note = chemically synthesized
  source 1..22: mol_type = other DNA
aaatggagacttttaacaaagc

SEQ ID NO: 52251 - DNA, 22 bp, synthetic construct
  misc_feature 1..22: note = chemically synthesized
  source 1..22: mol_type = other DNA
ttaacaaagcaactgttctcag

SEQ ID NO: 52252 - DNA, 22 bp, synthetic construct
  misc_feature 1..22: note = chemically synthesized
  source 1..22: mol_type = other DNA
taacaaagcaactgttctcagg

SEQ ID NO: 52253 - DNA, 22 bp, synthetic construct
  misc_feature 1..22: note = chemically synthesized
  source 1..22: mol_type = other DNA
aacaaagcaactgttctcaggg

SEQ ID NO: 52254 - DNA, 22 bp, synthetic construct
  misc_feature 1..22: note = chemically synthesized
  source 1..22: mol_type = other DNA
acaaagcaactgttctcagggg

SEQ ID NO: 52255 - DNA, 22 bp, synthetic construct
  misc_feature 1..22: note = chemically synthesized
  source 1..22: mol_type = other DNA
ttctcaggggacctattttctc

SEQ ID NO: 52256 - DNA, 22 bp, synthetic construct
  misc_feature 1..22: note = chemically synthesized
  source 1..22: mol_type = other DNA
tcaggggacctattttctccct

SEQ ID NO: 52257 - DNA, 22 bp, synthetic construct
  misc_feature 1..22: note = chemically synthesized
  source 1..22: mol_type = other DNA
aggggacctattttctccctta

SEQ ID NO: 52258 - DNA, 22 bp, synthetic construct
  misc_feature 1..22: note = chemically synthesized
  source 1..22: mol_type = other DNA
ttttctcccttaaaattcatta

SEQ ID NO: 52259 - DNA, 22 bp, synthetic construct
  misc_feature 1..22: note = chemically synthesized
  source 1..22: mol_type = other DNA
tctcccttaaaattcattatac

SEQ ID NO: 52260 - DNA, 22 bp, synthetic construct
  misc_feature 1..22: note = chemically synthesized
  source 1..22: mol_type = other DNA
ctcccttaaaattcattataca

SEQ ID NO: 52261 - DNA, 22 bp, synthetic construct
  misc_feature 1..22: note = chemically synthesized
  source 1..22: mol_type = other DNA
tcccttaaaattcattatacac

SEQ ID NO: 52262 - DNA, 22 bp, synthetic construct
  misc_feature 1..22: note = chemically synthesized
  source 1..22: mol_type = other DNA
ccttaaaattcattatacacat

SEQ ID NO: 52263 - DNA, 22 bp, synthetic construct
  misc_feature 1..22: note = chemically synthesized
  source 1..22: mol_type = other DNA
aaaattcattatacacatccct

SEQ ID NO: 52264 - DNA, 22 bp, synthetic construct
  misc_feature 1..22: note = chemically synthesized
  source 1..22: mol_type = other DNA
aaattcattatacacatccctg

SEQ ID NO: 52265 - DNA, 22 bp, synthetic construct
  misc_feature 1..22: note = chemically synthesized
  source 1..22: mol_type = other DNA
attatacacatccctggttgat

SEQ ID NO: 52266 - DNA, 22 bp, synthetic construct
  misc_feature 1..22: note = chemically synthesized
  source 1..22: mol_type = other DNA
tacacatccctggttgatagca

SEQ ID NO: 52267 - DNA, 22 bp, synthetic construct
  misc_feature 1..22: note = chemically synthesized
  source 1..22: mol_type = other DNA
gttgatagcagtgtgtctggag

SEQ ID NO: 52268 - DNA, 22 bp, synthetic construct
  misc_feature 1..22: note = chemically synthesized
  source 1..22: mol_type = other DNA
atagcagtgtgtctggaggcag

SEQ ID NO: 52269 - DNA, 22 bp, synthetic construct
  misc_feature 1..22: note = chemically synthesized
  source 1..22: mol_type = other DNA
gaggcagaaaccattcttgctt

SEQ ID NO: 52270 - DNA, 22 bp, synthetic construct
  misc_feature 1..22: note = chemically synthesized
  source 1..22: mol_type = other DNA
ttgctttggaaacaattacgtc

SEQ ID NO: 52271 - DNA, 22 bp, synthetic construct
  misc_feature 1..22: note = chemically synthesized
  source 1..22: mol_type = other DNA
gctttggaaacaattacgtctg

SEQ ID NO: 52272 - DNA, 22 bp, synthetic construct
  misc_feature 1..22: note = chemically synthesized
  source 1..22: mol_type = other DNA
ctttggaaacaattacgtctgt

SEQ ID NO: 52273 - DNA, 22 bp, synthetic construct
  misc_feature 1..22: note = chemically synthesized
  source 1..22: mol_type = other DNA
tggaaacaattacgtctgtgtt

SEQ ID NO: 52274 - DNA, 22 bp, synthetic construct
  misc_feature 1..22: note = chemically synthesized
  source 1..22: mol_type = other DNA
ggaaacaattacgtctgtgtta

SEQ ID NO: 52275 - DNA, 22 bp, synthetic construct
  misc_feature 1..22: note = chemically synthesized
  source 1..22: mol_type = other DNA
gaaacaattacgtctgtgttat

SEQ ID NO: 52276 - DNA, 22 bp, synthetic construct
  misc_feature 1..22: note = chemically synthesized
  source 1..22: mol_type = other DNA
cgtctgtgttatactgagtagg

SEQ ID NO: 52277 - DNA, 22 bp, synthetic construct
  misc_feature 1..22: note = chemically synthesized
  source 1..22: mol_type = other DNA
tgttatactgagtagggaagct

SEQ ID NO: 52278 - DNA, 22 bp, synthetic construct
  misc_feature 1..22: note = chemically synthesized
  source 1..22: mol_type = other DNA
tactgagtagggaagctcatta

SEQ ID NO: 52279 - DNA, 22 bp, synthetic construct
  misc_feature 1..22: note = chemically synthesized
  source 1..22: mol_type = other DNA
agtagggaagctcattaattgt

SEQ ID NO: 52280 - DNA, 22 bp, synthetic construct
  misc_feature 1..22: note = chemically synthesized
  source 1..22: mol_type = other DNA
attaattgtcgacacttacgtt

SEQ ID NO: 52281 - DNA, 22 bp, synthetic construct
  misc_feature 1..22: note = chemically synthesized
  source 1..22: mol_type = other DNA
attgtcgacacttacgttcctg

SEQ ID NO: 52282 - DNA, 22 bp, synthetic construct
  misc_feature 1..22: note = chemically synthesized
  source 1..22: mol_type = other DNA
tcgacacttacgttcctgataa

SEQ ID NO: 52283 - DNA, 22 bp, synthetic construct
  misc_feature 1..22: note = chemically synthesized
  source 1..22: mol_type = other DNA
acgttcctgataatgggatcag

SEQ ID NO: 52284 - DNA, 22 bp, synthetic construct
  misc_feature 1..22: note = chemically synthesized
  source 1..22: mol_type = other DNA
cgttcctgataatgggatcagt

SEQ ID NO: 52285 - DNA, 22 bp, synthetic construct
  misc_feature 1..22: note = chemically synthesized
  source 1..22: mol_type = other DNA
ctgataatgggatcagtgtgta

SEQ ID NO: 52286 - DNA, 22 bp, synthetic construct
  misc_feature 1..22: note = chemically synthesized
  source 1..22: mol_type = other DNA
ataatgggatcagtgtgtaatt

SEQ ID NO: 52287 - DNA, 22 bp, synthetic construct
  misc_feature 1..22: note = chemically synthesized
  source 1..22: mol_type = other DNA
ttgtttcgctccagatttctaa

SEQ ID NO: 52288 - DNA, 22 bp, synthetic construct
  misc_feature 1..22: note = chemically synthesized
  source 1..22: mol_type = other DNA
gtttcgctccagatttctaata

SEQ ID NO: 52289 - DNA, 22 bp, synthetic construct
  misc_feature 1..22: note = chemically synthesized
  source 1..22: mol_type = other DNA
tttcgctccagatttctaatac

SEQ ID NO: 52290 - DNA, 22 bp, synthetic construct
  misc_feature 1..22: note = chemically synthesized
  source 1..22: mol_type = other DNA
cgctccagatttctaataccac

SEQ ID NO: 52291 - DNA, 22 bp, synthetic construct
  misc_feature 1..22: note = chemically synthesized
  source 1..22: mol_type = other DNA
gctccagatttctaataccaca

SEQ ID NO: 52292 - DNA, 22 bp, synthetic construct
  misc_feature 1..22: note = chemically synthesized
  source 1..22: mol_type = other DNA
cagatttctaataccacaaaga

SEQ ID NO: 52293 - DNA, 22 bp, synthetic construct
  misc_feature 1..22: note = chemically synthesized
  source 1..22: mol_type = other DNA
ctaataccacaaagaataaatc

SEQ ID NO: 52294 - DNA, 22 bp, synthetic construct
  misc_feature 1..22: note = chemically synthesized
  source 1..22: mol_type = other DNA
taataccacaaagaataaatcc

SEQ ID NO: 52295 - DNA, 22 bp, synthetic construct
  misc_feature 1..22: note = chemically synthesized
  source 1..22: mol_type = other DNA
ataccacaaagaataaatcctt

SEQ ID NO: 52296 - DNA, 22 bp, synthetic construct
  misc_feature 1..22: note = chemically synthesized
  source 1..22: mol_type = other DNA
tcactctgatcaattttgttaa

SEQ ID NO: 52297 - DNA, 22 bp, synthetic construct
  misc_feature 1..22: note = chemically synthesized
  source 1..22: mol_type = other DNA
cactctgatcaattttgttaac

SEQ ID NO: 52298 - DNA, 22 bp, synthetic construct
  misc_feature 1..22: note = chemically synthesized
  source 1..22: mol_type = other DNA
actctgatcaattttgttaact

SEQ ID NO: 52299 - DNA, 22 bp, synthetic construct
  misc_feature 1..22: note = chemically synthesized
  source 1..22: mol_type = other DNA
tgatcaattttgttaacttctc

SEQ ID NO: 52300 - DNA, 22 bp, synthetic construct
  misc_feature 1..22: note = chemically synthesized
  source 1..22: mol_type = other DNA
atcaattttgttaacttctcac

SEQ ID NO: 52301 - DNA, 22 bp, synthetic construct
  misc_feature 1..22: note = chemically synthesized
  source 1..22: mol_type = other DNA
tgttaacttctcacgtgtcttc

SEQ ID NO: 52302 - DNA, 22 bp, synthetic construct
  misc_feature 1..22: note = chemically synthesized
  source 1..22: mol_type = other DNA
gttaacttctcacgtgtcttct

SEQ ID NO: 52303 - DNA, 22 bp, synthetic construct
  misc_feature 1..22: note = chemically synthesized
  source 1..22: mol_type = other DNA
ttaacttctcacgtgtcttctc

SEQ ID NO: 52304 - DNA, 22 bp, synthetic construct
  misc_feature 1..22: note = chemically synthesized
  source 1..22: mol_type = other DNA
acttctcacgtgtcttctctac

SEQ ID NO: 52305 - DNA, 22 bp, synthetic construct
  misc_feature 1..22: note = chemically synthesized
  source 1..22: mol_type = other DNA
ctcacgtgtcttctctacaccc

SEQ ID NO: 52306 - DNA, 22 bp, synthetic construct
  misc_feature 1..22: note = chemically synthesized
  source 1..22: mol_type = other DNA
tcacgtgtcttctctacaccca

SEQ ID NO: 52307 - DNA, 22 bp, synthetic construct
  misc_feature 1..22: note = chemically synthesized
  source 1..22: mol_type = other DNA
acgtgtcttctctacacccagg

SEQ ID NO: 52308 - DNA, 22 bp, synthetic construct
  misc_feature 1..22: note = chemically synthesized
  source 1..22: mol_type = other DNA
ctctacacccagggcaccggtg

SEQ ID NO: 52309 - DNA, 22 bp, synthetic construct
  misc_feature 1..22: note = chemically synthesized
  source 1..22: mol_type = other DNA
tctacacccagggcaccggtga

SEQ ID NO: 52310 - DNA, 22 bp, synthetic construct
  misc_feature 1..22: note = chemically synthesized
  source 1..22: mol_type = other DNA
tacacccagggcaccggtgaat

SEQ ID NO: 52311 - DNA, 22 bp, synthetic construct
  misc_feature 1..22: note = chemically synthesized
  source 1..22: mol_type = other DNA
cacccagggcaccggtgaatcc

SEQ ID NO: 52312 - DNA, 22 bp, synthetic construct
  misc_feature 1..22: note = chemically synthesized
  source 1..22: mol_type = other DNA
tgatggtcaaagttctagatgc

SEQ ID NO: 52313 - DNA, 22 bp, synthetic construct
  misc_feature 1..22: note = chemically synthesized
  source 1..22: mol_type = other DNA
atggtcaaagttctagatgctg

SEQ ID NO: 52314 - DNA, 22 bp, synthetic construct
  misc_feature 1..22: note = chemically synthesized
  source 1..22: mol_type = other DNA
tagatgctgtccgaggcagtcc

SEQ ID NO: 52315 - DNA, 22 bp, synthetic construct
  misc_feature 1..22: note = chemically synthesized
  source 1..22: mol_type = other DNA
gatgctgtccgaggcagtcctg

SEQ ID NO: 52316 - DNA, 22 bp, synthetic construct
  misc_feature 1..22: note = chemically synthesized
  source 1..22: mol_type = other DNA
tccgaggcagtcctgccatcaa

SEQ ID NO: 52317 - DNA, 22 bp, synthetic construct
  misc_feature 1..22: note = chemically synthesized
  source 1..22: mol_type = other DNA
ccatcaatgtggccgtgcatgt

SEQ ID NO: 52318 - DNA, 22 bp, synthetic construct
  misc_feature 1..22: note = chemically synthesized
  source 1..22: mol_type = other DNA
agaaaggctgctgatgacacct

SEQ ID NO: 52319 - DNA, 22 bp, synthetic construct
  misc_feature 1..22: note = chemically synthesized
  source 1..22: mol_type = other DNA
ctgatgacacctgggagccatt

SEQ ID NO: 52320 - DNA, 22 bp, synthetic construct
  misc_feature 1..22: note = chemically synthesized
  source 1..22: mol_type = other DNA
atgacacctgggagccatttgc

SEQ ID NO: 52321 - DNA, 22 bp, synthetic construct
  misc_feature 1..22: note = chemically synthesized
  source 1..22: mol_type = other DNA
ccaggtgtcatcagcagccttt

SEQ ID NO: 52322 - DNA, 22 bp, synthetic construct
  misc_feature 1..22: note = chemically synthesized
  source 1..22: mol_type = other DNA
tctgaacacatgcacggccaca

SEQ ID NO: 52323 - DNA, 22 bp, synthetic construct
  misc_feature 1..22: note = chemically synthesized
  source 1..22: mol_type = other DNA
ctgaacacatgcacggccacat

SEQ ID NO: 52324 - DNA, 22 bp, synthetic construct
  misc_feature 1..22: note = chemically synthesized
  source 1..22: mol_type = other DNA
tgaacacatgcacggccacatt

SEQ ID NO: 52325 - DNA, 22 bp, synthetic construct
  misc_feature 1..22: note = chemically synthesized
  source 1..22: mol_type = other DNA
aacacatgcacggccacattga

SEQ ID NO: 52326 - DNA, 22 bp, synthetic construct
  misc_feature 1..22: note = chemically synthesized
  source 1..22: mol_type = other DNA
atggcaggactgcctcggacag

SEQ ID NO: 52327 - DNA, 22 bp, synthetic construct
  misc_feature 1..22: note = chemically synthesized
  source 1..22: mol_type = other DNA
cctcggacagcatctagaactt

SEQ ID NO: 52328 - DNA, 22 bp, synthetic construct
  misc_feature 1..22: note = chemically synthesized
  source 1..22: mol_type = other DNA
ggacagcatctagaactttgac

SEQ ID NO: 52329 - DNA, 22 bp, synthetic construct
  misc_feature 1..22: note = chemically synthesized
  source 1..22: mol_type = other DNA
gaactttgaccatcagaggaca

SEQ ID NO: 52330 - DNA, 22 bp, synthetic construct
  misc_feature 1..22: note = chemically synthesized
  source 1..22: mol_type = other DNA
tgaccatcagaggacacttgga

SEQ ID NO: 52331 - DNA, 22 bp, synthetic construct
  misc_feature 1..22: note = chemically synthesized
  source 1..22: mol_type = other DNA
gaccatcagaggacacttggat

SEQ ID NO: 52332 - DNA, 22 bp, synthetic construct
  misc_feature 1..22: note = chemically synthesized
  source 1..22: mol_type = other DNA
accatcagaggacacttggatt

SEQ ID NO: 52333 - DNA, 22 bp, synthetic construct
  misc_feature 1..22: note = chemically synthesized
  source 1..22: mol_type = other DNA
ggattcaccggtgccctgggtg

SEQ ID NO: 52334 - DNA, 22 bp, synthetic construct
  misc_feature 1..22: note = chemically synthesized
  source 1..22: mol_type = other DNA
gattcaccggtgccctgggtgt

SEQ ID NO: 52335 - DNA, 22 bp, synthetic construct
  misc_feature 1..22: note = chemically synthesized
  source 1..22: mol_type = other DNA
accggtgccctgggtgtagaga

SEQ ID NO: 52336 - DNA, 22 bp, synthetic construct
  misc_feature 1..22: note = chemically synthesized
  source 1..22: mol_type = other DNA
ggtgtagagaagacacgtgaga

SEQ ID NO: 52337 - DNA, 22 bp, synthetic construct
  misc_feature 1..22: note = chemically synthesized
  source 1..22: mol_type = other DNA
acaaaattgatcagagtgaaag

SEQ ID NO: 52338 - DNA, 22 bp, synthetic construct
  misc_feature 1..22: note = chemically synthesized
  source 1..22: mol_type = other DNA
atcagagtgaaaggatttattc

SEQ ID NO: 52339 - DNA, 22 bp, synthetic construct
  misc_feature 1..22: note = chemically synthesized
  source 1..22: mol_type = other DNA
attctttgtggtattagaaatc

SEQ ID NO: 52340 - DNA, 22 bp, synthetic construct
  misc_feature 1..22: note = chemically synthesized
  source 1..22: mol_type = other DNA
ttctttgtggtattagaaatct

SEQ ID NO: 52341 - DNA, 22 bp, synthetic construct
  misc_feature 1..22: note = chemically synthesized
  source 1..22: mol_type = other DNA
tttgtggtattagaaatctgga

SEQ ID NO: 52342 - DNA, 22 bp, synthetic construct
  misc_feature 1..22: note = chemically synthesized
  source 1..22: mol_type = other DNA
tgtggtattagaaatctggagc

SEQ ID NO: 52343 - DNA, 22 bp, synthetic construct
  misc_feature 1..22: note = chemically synthesized
  source 1..22: mol_type = other DNA
gtggtattagaaatctggagcg

SEQ ID NO: 52344 - DNA, 22 bp, synthetic construct
  misc_feature 1..22: note = chemically synthesized
  source 1..22: mol_type = other DNA
tggtattagaaatctggagcga

SEQ ID NO: 52345 - DNA, 22 bp, synthetic construct
  misc_feature 1..22: note = chemically synthesized
  source 1..22: mol_type = other DNA
gaaatctggagcgaaacaagaa

SEQ ID NO: 52346 - DNA, 22 bp, synthetic construct
  misc_feature 1..22: note = chemically synthesized
  source 1..22: mol_type = other DNA
gagcgaaacaagaattacacac

SEQ ID NO: 52347 - DNA, 22 bp, synthetic construct
  misc_feature 1..22: note = chemically synthesized
  source 1..22: mol_type = other DNA
cacactgatcccattatcagga

SEQ ID NO: 52348 - DNA, 22 bp, synthetic construct
  misc_feature 1..22: note = chemically synthesized
  source 1..22: mol_type = other DNA
atcccattatcaggaacgtaag

SEQ ID NO: 52349 - DNA, 22 bp, synthetic construct
  misc_feature 1..22: note = chemically synthesized
  source 1..22: mol_type = other DNA
tcaggaacgtaagtgtcgacaa

SEQ ID NO: 52350 - DNA, 22 bp, synthetic construct
  misc_feature 1..22: note = chemically synthesized
  source 1..22: mol_type = other DNA
atgagcttccctactcagtata

SEQ ID NO: 52351 - DNA, 22 bp, synthetic construct
  misc_feature 1..22: note = chemically synthesized
  source 1..22: mol_type = other DNA
ccctactcagtataacacagac

SEQ ID NO: 52352 - DNA, 22 bp, synthetic construct
  misc_feature 1..22: note = chemically synthesized
  source 1..22: mol_type = other DNA
cctactcagtataacacagacg

SEQ ID NO: 52353 - DNA, 22 bp, synthetic construct
  misc_feature 1..22: note = chemically synthesized
  source 1..22: mol_type = other DNA
ctcagtataacacagacgtaat

SEQ ID NO: 52354 - DNA, 22 bp, synthetic construct
  misc_feature 1..22: note = chemically synthesized
  source 1..22: mol_type = other DNA
agtataacacagacgtaattgt

SEQ ID NO: 52355 - DNA, 22 bp, synthetic construct
  misc_feature 1..22: note = chemically synthesized
  source 1..22: mol_type = other DNA
tttccaaagcaagaatggtttc

SEQ ID NO: 52356 - DNA, 22 bp, synthetic construct
  misc_feature 1..22: note = chemically synthesized
  source 1..22: mol_type = other DNA
ccaaagcaagaatggtttctgc

SEQ ID NO: 52357 - DNA, 22 bp, synthetic construct
  misc_feature 1..22: note = chemically synthesized
  source 1..22: mol_type = other DNA
caaagcaagaatggtttctgcc

SEQ ID NO: 52358 - DNA, 22 bp, synthetic construct
  misc_feature 1..22: note = chemically synthesized
  source 1..22: mol_type = other DNA
ctgcctccagacacactgctat

SEQ ID NO: 52359 - DNA, 22 bp, synthetic construct
  misc_feature 1..22: note = chemically synthesized
  source 1..22: mol_type = other DNA
tgcctccagacacactgctatc

SEQ ID NO: 52360 - DNA, 22 bp, synthetic construct
  misc_feature 1..22: note = chemically synthesized
  source 1..22: mol_type = other DNA
cctccagacacactgctatcaa

SEQ ID NO: 52361 - DNA, 22 bp, synthetic construct
  misc_feature 1..22: note = chemically synthesized
  source 1..22: mol_type = other DNA
cagacacactgctatcaaccag

SEQ ID NO: 52362 - DNA, 22 bp, synthetic construct
  misc_feature 1..22: note = chemically synthesized
  source 1..22: mol_type = other DNA
ctatcaaccagggatgtgtata

SEQ ID NO: 52363 - DNA, 22 bp, synthetic construct
  misc_feature 1..22: note = chemically synthesized
  source 1..22: mol_type = other DNA
tcaaccagggatgtgtataatg

SEQ ID NO: 52364 - DNA, 22 bp, synthetic construct
  misc_feature 1..22: note = chemically synthesized
  source 1..22: mol_type = other DNA
taagggagaaaataggtcccct

SEQ ID NO: 52365 - DNA, 22 bp, synthetic construct
  misc_feature 1..22: note = chemically synthesized
  source 1..22: mol_type = other DNA
aagggagaaaataggtcccctg

SEQ ID NO: 52366 - DNA, 22 bp, synthetic construct
  misc_feature 1..22: note = chemically synthesized
  source 1..22: mol_type = other DNA
agggagaaaataggtcccctga

SEQ ID NO: 52367 - DNA, 22 bp, synthetic construct
  misc_feature 1..22: note = chemically synthesized
  source 1..22: mol_type = other DNA
agaacagttgctttgttaaaag

SEQ ID NO: 52368 - DNA, 22 bp, synthetic construct
  misc_feature 1..22: note = chemically synthesized
  source 1..22: mol_type = other DNA
ctttgttaaaagtctccatttg

SEQ ID NO: 52369 - DNA, 22 bp, synthetic construct
  misc_feature 1..22: note = chemically synthesized
  source 1..22: mol_type = other DNA
tgttaaaagtctccatttgagt

SEQ ID NO: 52370 - DNA, 22 bp, synthetic construct
  misc_feature 1..22: note = chemically synthesized
  source 1..22: mol_type = other DNA
gttaaaagtctccatttgagtg

SEQ ID NO: 52371 - DNA, 22 bp, synthetic construct
  misc_feature 1..22: note = chemically synthesized
  source 1..22: mol_type = other DNA
ttaaaagtctccatttgagtgg

SEQ ID NO: 52372 - DNA, 22 bp, synthetic construct
  misc_feature 1..22: note = chemically synthesized
  source 1..22: mol_type = other DNA
aaagtctccatttgagtggaat

SEQ ID NO: 52373 - DNA, 22 bp, synthetic construct
  misc_feature 1..22: note = chemically synthesized
  source 1..22: mol_type = other DNA
catttgagtggaattactgaaa

SEQ ID NO: 52374 - DNA, 22 bp, synthetic construct
  misc_feature 1..22: note = chemically synthesized
  source 1..22: mol_type = other DNA
gagtggaattactgaaaagatg

SEQ ID NO: 52375 - DNA, 22 bp, synthetic construct
  misc_feature 1..22: note = chemically synthesized
  source 1..22: mol_type = other DNA
agtggaattactgaaaagatgt

SEQ ID NO: 52376 - DNA, 22 bp, synthetic construct
  misc_feature 1..22: note = chemically synthesized
  source 1..22: mol_type = other DNA
ctgaaaagatgtaatgtaccat

SEQ ID NO: 52377 - DNA, 22 bp, synthetic construct
  misc_feature 1..22: note = chemically synthesized
  source 1..22: mol_type = other DNA
aaaagatgtaatgtaccataca

SEQ ID NO: 52378 - DNA, 22 bp, synthetic construct
  misc_feature 1..22: note = chemically synthesized
  source 1..22: mol_type = other DNA
tcctgagatcattttagttgtt

SEQ ID NO: 52379 - DNA, 22 bp, synthetic construct
  misc_feature 1..22: note = chemically synthesized
  source 1..22: mol_type = other DNA
cctgagatcattttagttgttg

SEQ ID NO: 52380 - DNA, 22 bp, synthetic construct
  misc_feature 1..22: note = chemically synthesized
  source 1..22: mol_type = other DNA
ctgagatcattttagttgttgc

SEQ ID NO: 52381 - DNA, 22 bp, synthetic construct
  misc_feature 1..22: note = chemically synthesized
  source 1..22: mol_type = other DNA
agatcattttagttgttgctat

SEQ ID NO: 52382 - DNA, 22 bp, synthetic construct
  misc_feature 1..22: note = chemically synthesized
  source 1..22: mol_type = other DNA
tagttgttgctatagtcactcc

SEQ ID NO: 52383 - DNA, 22 bp, synthetic construct
  misc_feature 1..22: note = chemically synthesized
  source 1..22: mol_type = other DNA
agttgttgctatagtcactccc

SEQ ID NO: 52384 - DNA, 22 bp, synthetic construct
  misc_feature 1..22: note = chemically synthesized
  source 1..22: mol_type = other DNA
gttgttgctatagtcactccct

SEQ ID NO: 52385 - DNA, 22 bp, synthetic construct
  misc_feature 1..22: note = chemically synthesized
  source 1..22: mol_type = other DNA
ttgctatagtcactccctctta

SEQ ID NO: 52386 - DNA, 22 bp, synthetic construct
  misc_feature 1..22: note = chemically synthesized
  source 1..22: mol_type = other DNA
ctatagtcactccctcttacca

SEQ ID NO: 52387 - DNA, 22 bp, synthetic construct
  misc_feature 1..22: note = chemically synthesized
  source 1..22: mol_type = other DNA
tagtcactccctcttaccagtt

SEQ ID NO: 52388 - DNA, 22 bp, synthetic construct
  misc_feature 1..22: note = chemically synthesized
  source 1..22: mol_type = other DNA
cctcttaccagttgttataaaa

SEQ ID NO: 52389 - DNA, 22 bp, synthetic construct
  misc_feature 1..22: note = chemically synthesized
  source 1..22: mol_type = other DNA
ttaccagttgttataaaataat

SEQ ID NO: 52390 - DNA, 22 bp, synthetic construct
  misc_feature 1..22: note = chemically synthesized
  source 1..22: mol_type = other DNA
accagttgttataaaataatgt

SEQ ID NO: 52391 - DNA, 22 bp, synthetic construct
  misc_feature 1..22: note = chemically synthesized
  source 1..22: mol_type = other DNA
ccagttgttataaaataatgtc

SEQ ID NO: 52392 - DNA, 22 bp, synthetic construct
  misc_feature 1..22: note = chemically synthesized
  source 1..22: mol_type = other DNA
ttataaaataatgtcagaacta

SEQ ID NO: 52393 - DNA, 22 bp, synthetic construct
  misc_feature 1..22: note = chemically synthesized
  source 1..22: mol_type = other DNA
taaaataatgtcagaactacat

SEQ ID NO: 52394 - DNA, 22 bp, synthetic construct
  misc_feature 1..22: note = chemically synthesized
  source 1..22: mol_type = other DNA
catccagacccattttatagta

SEQ ID NO: 52395 - DNA, 22 bp, synthetic construct
  misc_feature 1..22: note = chemically synthesized
  source 1..22: mol_type = other DNA
tatagtattagttaattcttct

SEQ ID NO: 52396 - DNA, 22 bp, synthetic construct
  misc_feature 1..22: note = chemically synthesized
  source 1..22: mol_type = other DNA
atagtattagttaattcttcta

SEQ ID NO: 52397 - DNA, 22 bp, synthetic construct
  misc_feature 1..22: note = chemically synthesized
  source 1..22: mol_type = other DNA
tagtattagttaattcttctag

SEQ ID NO: 52398 - DNA, 22 bp, synthetic construct
  misc_feature 1..22: note = chemically synthesized
  source 1..22: mol_type = other DNA
gttaattcttctagaggattta

SEQ ID NO: 52399 - DNA, 22 bp, synthetic construct
  misc_feature 1..22: note = chemically synthesized
  source 1..22: mol_type = other DNA
attcttctagaggatttaagaa

SEQ ID NO: 52400 - DNA, 22 bp, synthetic construct
  misc_feature 1..22: note = chemically synthesized
  source 1..22: mol_type = other DNA
ttctagaggatttaagaattag

SEQ ID NO: 52401 - DNA, 22 bp, synthetic construct
  misc_feature 1..22: note = chemically synthesized
  source 1..22: mol_type = other DNA
ctagaggatttaagaattagat

SEQ ID NO: 52402 - DNA, 22 bp, synthetic construct
  misc_feature 1..22: note = chemically synthesized
  source 1..22: mol_type = other DNA
tagaggatttaagaattagata

SEQ ID NO: 52403 - DNA, 22 bp, synthetic construct
  misc_feature 1..22: note = chemically synthesized
  source 1..22: mol_type = other DNA
gaggatttaagaattagatatc

SEQ ID NO: 52404 - DNA, 22 bp, synthetic construct
  misc_feature 1..22: note = chemically synthesized
  source 1..22: mol_type = other DNA
aagaattagatatctgactaga

SEQ ID NO: 52405 - DNA, 22 bp, synthetic construct
  misc_feature 1..22: note = chemically synthesized
  source 1..22: mol_type = other DNA
agaattagatatctgactagaa

SEQ ID NO: 52406 - DNA, 22 bp, synthetic construct
  misc_feature 1..22: note = chemically synthesized
  source 1..22: mol_type = other DNA
gatatctgactagaatattgtt

SEQ ID NO: 52407 - DNA, 22 bp, synthetic construct
  misc_feature 1..22: note = chemically synthesized
  source 1..22: mol_type = other DNA
actagaatattgttcactaagc

SEQ ID NO: 52408 - DNA, 22 bp, synthetic construct
  misc_feature 1..22: note = chemically synthesized
  source 1..22: mol_type = other DNA
gaatattgttcactaagccttt

SEQ ID NO: 52409 - DNA, 22 bp, synthetic construct
  misc_feature 1..22: note = chemically synthesized
  source 1..22: mol_type = other DNA
ttcactaagccttttaaagatt

SEQ ID NO: 52410 - DNA, 22 bp, synthetic construct
  misc_feature 1..22: note = chemically synthesized
  source 1..22: mol_type = other DNA
actaagccttttaaagattaat

SEQ ID NO: 52411 - DNA, 22 bp, synthetic construct
  misc_feature 1..22: note = chemically synthesized
  source 1..22: mol_type = other DNA
agccttttaaagattaatcaat

SEQ ID NO: 52412 - DNA, 22 bp, synthetic construct
  misc_feature 1..22: note = chemically synthesized
  source 1..22: mol_type = other DNA
ttaaagattaatcaataaatac

SEQ ID NO: 52413 - DNA, 22 bp, synthetic construct
  misc_feature 1..22: note = chemically synthesized
  source 1..22: mol_type = other DNA
taaagattaatcaataaatacg

SEQ ID NO: 52414 - DNA, 22 bp, synthetic construct
  misc_feature 1..22: note = chemically synthesized
  source 1..22: mol_type = other DNA
aaagattaatcaataaatacgt

SEQ ID NO: 52415 - DNA, 22 bp, synthetic construct
  misc_feature 1..22: note = chemically synthesized
  source 1..22: mol_type = other DNA
aagattaatcaataaatacgtt

SEQ ID NO: 52416 - DNA, 22 bp, synthetic construct
  misc_feature 1..22: note = chemically synthesized
  source 1..22: mol_type = other DNA
atcaataaatacgttttgaata

SEQ ID NO: 52417 - DNA, 22 bp, synthetic construct
  misc_feature 1..22: note = chemically synthesized
  source 1..22: mol_type = other DNA
tgaataactatagggccagaat

SEQ ID NO: 52418 - DNA, 22 bp, synthetic construct
  misc_feature 1..22: note = chemically synthesized
  source 1..22: mol_type = other DNA
gaataactatagggccagaata

SEQ ID NO: 52419 - DNA, 22 bp, synthetic construct
  misc_feature 1..22: note = chemically synthesized
  source 1..22: mol_type = other DNA
aataactatagggccagaatat

SEQ ID NO: 52420 - DNA, 22 bp, synthetic construct
  misc_feature 1..22: note = chemically synthesized
  source 1..22: mol_type = other DNA
tagggccagaatataatctcct

SEQ ID NO: 52421 - DNA, 22 bp, synthetic construct
  misc_feature 1..22: note = chemically synthesized
  source 1..22: mol_type = other DNA
ctgcagtttgtcccccaaatac

SEQ ID NO: 52422 - DNA, 22 bp, synthetic construct
  misc_feature 1..22: note = chemically synthesized
  source 1..22: mol_type = other DNA
cagtttgtcccccaaatacatt

SEQ ID NO: 52423 - DNA, 22 bp, synthetic construct
  misc_feature 1..22: note = chemically synthesized
  source 1..22: mol_type = other DNA
gtcccccaaatacattttatgg

SEQ ID NO: 52424 - DNA, 22 bp, synthetic construct
  misc_feature 1..22: note = chemically synthesized
  source 1..22: mol_type = other DNA
tcccccaaatacattttatgga

SEQ ID NO: 52425 - DNA, 22 bp, synthetic construct
  misc_feature 1..22: note = chemically synthesized
  source 1..22: mol_type = other DNA
tatggagggatacttttctgaa

SEQ ID NO: 52426 - DNA, 22 bp, synthetic construct
  misc_feature 1..22: note = chemically synthesized
  source 1..22: mol_type = other DNA
atggagggatacttttctgaaa

SEQ ID NO: 52427 - DNA, 22 bp, synthetic construct
  misc_feature 1..22: note = chemically synthesized
  source 1..22: mol_type = other DNA
tggagggatacttttctgaaaa

SEQ ID NO: 52428 - DNA, 22 bp, synthetic construct
  misc_feature 1..22: note = chemically synthesized
  source 1..22: mol_type = other DNA
ttctgaaaattcagtattaaca

SEQ ID NO: 52429 - DNA, 22 bp, synthetic construct
  misc_feature 1..22: note = chemically synthesized
  source 1..22: mol_type = other DNA
tctgaaaattcagtattaacag

SEQ ID NO: 52430 - DNA, 22 bp, synthetic construct
  misc_feature 1..22: note = chemically synthesized
  source 1..22: mol_type = other DNA
ctgaaaattcagtattaacagc

SEQ ID NO: 52431 - DNA, 22 bp, synthetic construct
  misc_feature 1..22: note = chemically synthesized
  source 1..22: mol_type = other DNA
tgaaaattcagtattaacagct

SEQ ID NO: 52432 - DNA, 22 bp, synthetic construct
  misc_feature 1..22: note = chemically synthesized
  source 1..22: mol_type = other DNA
aaaattcagtattaacagcttc

SEQ ID NO: 52433 - DNA, 22 bp, synthetic construct
  misc_feature 1..22: note = chemically synthesized
  source 1..22: mol_type = other DNA
agtattaacagcttccttaata

SEQ ID NO: 52434 - DNA, 22 bp, synthetic construct
  misc_feature 1..22: note = chemically synthesized
  source 1..22: mol_type = other DNA
acagcttccttaatatcatatc

SEQ ID NO: 52435 - DNA, 22 bp, synthetic construct
  misc_feature 1..22: note = chemically synthesized
  source 1..22: mol_type = other DNA
ccttaatatcatatctttattt

SEQ ID NO: 52436 - DNA, 22 bp, synthetic construct
  misc_feature 1..22: note = chemically synthesized
  source 1..22: mol_type = other DNA
cttaatatcatatctttatttc

SEQ ID NO: 52437 - DNA, 22 bp, synthetic construct
  misc_feature 1..22: note = chemically synthesized
  source 1..22: mol_type = other DNA
aatatcatatctttatttctat

SEQ ID NO: 52438 - DNA, 22 bp, synthetic construct
  misc_feature 1..22: note = chemically synthesized
  source 1..22: mol_type = other DNA
atatcatatctttatttctatc

SEQ ID NO: 52439 - DNA, 22 bp, synthetic construct
  misc_feature 1..22: note = chemically synthesized
  source 1..22: mol_type = other DNA
tatttctatcatctatctgagg

SEQ ID NO: 52440 - DNA, 22 bp, synthetic construct
  misc_feature 1..22: note = chemically synthesized
  source 1..22: mol_type = other DNA
atttctatcatctatctgagga

SEQ ID NO: 52441 - DNA, 22 bp, synthetic construct
  misc_feature 1..22: note = chemically synthesized
  source 1..22: mol_type = other DNA
tttctatcatctatctgaggaa

SEQ ID NO: 52442 - DNA, 22 bp, synthetic construct
  misc_feature 1..22: note = chemically synthesized
  source 1..22: mol_type = other DNA
ctatcatctatctgaggaaaca

SEQ ID NO: 52443 - DNA, 22 bp, synthetic construct
  misc_feature 1..22: note = chemically synthesized
  source 1..22: mol_type = other DNA
tatcatctatctgaggaaacag

SEQ ID NO: 52444 - DNA, 22 bp, synthetic construct
  misc_feature 1..22: note = chemically synthesized
  source 1..22: mol_type = other DNA
tcatctatctgaggaaacagag

SEQ ID NO: 52445 - DNA, 22 bp, synthetic construct
  misc_feature 1..22: note = chemically synthesized
  source 1..22: mol_type = other DNA
tctgaggaaacagaggtaccag

SEQ ID NO: 52446 - DNA, 22 bp, synthetic construct
  misc_feature 1..22: note = chemically synthesized
  source 1..22: mol_type = other DNA
aggaaacagaggtaccagatat

SEQ ID NO: 52447 - DNA, 22 bp, synthetic construct
  misc_feature 1..22: note = chemically synthesized
  source 1..22: mol_type = other DNA
caaacctaatgcaccaaagcaa

SEQ ID NO: 52448 - DNA, 22 bp, synthetic construct
  misc_feature 1..22: note = chemically synthesized
  source 1..22: mol_type = other DNA
atgcaccaaagcaatgaggtag

SEQ ID NO: 52449 - DNA, 22 bp, synthetic construct
  misc_feature 1..22: note = chemically synthesized
  source 1..22: mol_type = other DNA
agagttcaagtcccagctcagt

SEQ ID NO: 52450 - DNA, 22 bp, synthetic construct
  misc_feature 1..22: note = chemically synthesized
  source 1..22: mol_type = other DNA
aagtcccagctcagtaagctca

SEQ ID NO: 52451 - DNA, 22 bp, synthetic construct
  misc_feature 1..22: note = chemically synthesized
  source 1..22: mol_type = other DNA
agtaagctcagtggaacttcat

SEQ ID NO: 52452 - DNA, 22 bp, synthetic construct
  misc_feature 1..22: note = chemically synthesized
  source 1..22: mol_type = other DNA
agtggaacttcattctttttga

SEQ ID NO: 52453 - DNA, 22 bp, synthetic construct
  misc_feature 1..22: note = chemically synthesized
  source 1..22: mol_type = other DNA
cattctttttgaagtttgaatt

SEQ ID NO: 52454 - DNA, 22 bp, synthetic construct
  misc_feature 1..22: note = chemically synthesized
  source 1..22: mol_type = other DNA
attctttttgaagtttgaatta

SEQ ID NO: 52455 - DNA, 22 bp, synthetic construct
  misc_feature 1..22: note = chemically synthesized
  source 1..22: mol_type = other DNA
tttttgaagtttgaattaatta

SEQ ID NO: 52456 - DNA, 22 bp, synthetic construct
  misc_feature 1..22: note = chemically synthesized
  source 1..22: mol_type = other DNA
tttgaagtttgaattaattata

SEQ ID NO: 52457 - DNA, 22 bp, synthetic construct
  misc_feature 1..22: note = chemically synthesized
  source 1..22: mol_type = other DNA
ttgaagtttgaattaattatat

SEQ ID NO: 52458 - DNA, 22 bp, synthetic construct
  misc_feature 1..22: note = chemically synthesized
  source 1..22: mol_type = other DNA
tgaagtttgaattaattatatt

SEQ ID NO: 52459 - DNA, 22 bp, synthetic construct
  misc_feature 1..22: note = chemically synthesized
  source 1..22: mol_type = other DNA
gaagtttgaattaattatatta

SEQ ID NO: 52460 - DNA, 22 bp, synthetic construct
  misc_feature 1..22: note = chemically synthesized
  source 1..22: mol_type = other DNA
aagtttgaattaattatattaa

SEQ ID NO: 52461 - DNA, 22 bp, synthetic construct
  misc_feature 1..22: note = chemically synthesized
  source 1..22: mol_type = other DNA
gaattaattatattaaaaatag

SEQ ID NO: 52462 - DNA, 22 bp, synthetic construct
  misc_feature 1..22: note = chemically synthesized
  source 1..22: mol_type = other DNA
aattaattatattaaaaataga

SEQ ID NO: 52463 - DNA, 22 bp, synthetic construct
  misc_feature 1..22: note = chemically synthesized
  source 1..22: mol_type = other DNA
attatattaaaaatagatgctg

SEQ ID NO: 52464 - DNA, 22 bp, synthetic construct
  misc_feature 1..22: note = chemically synthesized
  source 1..22: mol_type = other DNA
tattaaaaatagatgctgggta

SEQ ID NO: 52465 - DNA, 22 bp, synthetic construct
  misc_feature 1..22: note = chemically synthesized
  source 1..22: mol_type = other DNA
aaaatagatgctgggtaccctt

SEQ ID NO: 52466 - DNA, 22 bp, synthetic construct
  misc_feature 1..22: note = chemically synthesized
  source 1..22: mol_type = other DNA
ggtacccttgccctagtaataa

SEQ ID NO: 52467 - DNA, 22 bp, synthetic construct
  misc_feature 1..22: note = chemically synthesized
  source 1..22: mol_type = other DNA
gccctagtaataaaagctggtt

SEQ ID NO: 52468 - DNA, 22 bp, synthetic construct
  misc_feature 1..22: note = chemically synthesized
  source 1..22: mol_type = other DNA
ccctagtaataaaagctggttg

SEQ ID NO: 52469 - DNA, 22 bp, synthetic construct
  misc_feature 1..22: note = chemically synthesized
  source 1..22: mol_type = other DNA
gtaataaaagctggttggcaaa

SEQ ID NO: 52470 - DNA, 22 bp, synthetic construct
  misc_feature 1..22: note = chemically synthesized
  source 1..22: mol_type = other DNA
gttggcaaagctggaaggagtc

SEQ ID NO: 52471 - DNA, 22 bp, synthetic construct
  misc_feature 1..22: note = chemically synthesized
  source 1..22: mol_type = other DNA
gcaaagctggaaggagtcactt

SEQ ID NO: 52472 - DNA, 22 bp, synthetic construct
  misc_feature 1..22: note = chemically synthesized
  source 1..22: mol_type = other DNA
gaaggagtcacttctacttcat

SEQ ID NO: 52473 - DNA, 22 bp, synthetic construct
  misc_feature 1..22: note = chemically synthesized
  source 1..22: mol_type = other DNA
ctacttcatttagcgtgaatct

SEQ ID NO: 52474 - DNA, 22 bp, synthetic construct
  misc_feature 1..22: note = chemically synthesized
  source 1..22: mol_type = other DNA
tacttcatttagcgtgaatctt

SEQ ID NO: 52475 - DNA, 22 bp, synthetic construct
  misc_feature 1..22: note = chemically synthesized
  source 1..22: mol_type = other DNA
cttcatttagcgtgaatcttaa

SEQ ID NO: 52476 - DNA, 22 bp, synthetic construct
  misc_feature 1..22: note = chemically synthesized
  source 1..22: mol_type = other DNA
catttagcgtgaatcttaaatg

SEQ ID NO: 52477 - DNA, 22 bp, synthetic construct
  misc_feature 1..22: note = chemically synthesized
  source 1..22: mol_type = other DNA
atttagcgtgaatcttaaatgt

SEQ ID NO: 52478 - DNA, 22 bp, synthetic construct
  misc_feature 1..22: note = chemically synthesized
  source 1..22: mol_type = other DNA
agcgtgaatcttaaatgtagga

SEQ ID NO: 52479 - DNA, 22 bp, synthetic construct
  misc_feature 1..22: note = chemically synthesized
  source 1..22: mol_type = other DNA
gcgtgaatcttaaatgtaggaa

SEQ ID NO: 52480 - DNA, 22 bp, synthetic construct
  misc_feature 1..22: note = chemically synthesized
  source 1..22: mol_type = other DNA
aaatgtaggaatgggatgtcac

SEQ ID NO: 52481 - DNA, 22 bp, synthetic construct
  misc_feature 1..22: note = chemically synthesized
  source 1..22: mol_type = other DNA
aatgtaggaatgggatgtcaca

SEQ ID NO: 52482 - DNA, 22 bp, synthetic construct
  misc_feature 1..22: note = chemically synthesized
  source 1..22: mol_type = other DNA
accgtagggccagcctcagaca

SEQ ID NO: 52483 - DNA, 22 bp, synthetic construct
  misc_feature 1..22: note = chemically synthesized
  source 1..22: mol_type = other DNA
agacacaaataccagtccagca

SEQ ID NO: 52484 - DNA, 22 bp, synthetic construct
  misc_feature 1..22: note = chemically synthesized
  source 1..22: mol_type = other DNA
ccaagaatgagtggacttctgt

SEQ ID NO: 52485 - DNA, 22 bp, synthetic construct
  misc_feature 1..22: note = chemically synthesized
  source 1..22: mol_type = other DNA
ctgtgatggctgctcccagcct

SEQ ID NO: 52486 - DNA, 22 bp, synthetic construct
  misc_feature 1..22: note = chemically synthesized
  source 1..22: mol_type = other DNA
tgtgatggctgctcccagcctg

SEQ ID NO: 52487 - DNA, 22 bp, synthetic construct
  misc_feature 1..22: note = chemically synthesized
  source 1..22: mol_type = other DNA
tgatggctgctcccagcctggg

SEQ ID NO: 52488 - DNA, 22 bp, synthetic construct
  misc_feature 1..22: note = chemically synthesized
  source 1..22: mol_type = other DNA
ctcccagcctggggcttttata

SEQ ID NO: 52489 - DNA, 22 bp, synthetic construct
  misc_feature 1..22: note = chemically synthesized
  source 1..22: mol_type = other DNA
ccagcctggggcttttatactc

SEQ ID NO: 52490 - DNA, 22 bp, synthetic construct
  misc_feature 1..22: note = chemically synthesized
  source 1..22: mol_type = other DNA
gggcttttatactcacttctcc

SEQ ID NO: 52491 - DNA, 22 bp, synthetic construct
  misc_feature 1..22: note = chemically synthesized
  source 1..22: mol_type = other DNA
ttatactcacttctcctgagct

SEQ ID NO: 52492 - DNA, 22 bp, synthetic construct
  misc_feature 1..22: note = chemically synthesized
  source 1..22: mol_type = other DNA
tatactcacttctcctgagcta

SEQ ID NO: 52493 - DNA, 22 bp, synthetic construct
  misc_feature 1..22: note = chemically synthesized
  source 1..22: mol_type = other DNA
atactcacttctcctgagctag

SEQ ID NO: 52494 - DNA, 22 bp, synthetic construct
  misc_feature 1..22: note = chemically synthesized
  source 1..22: mol_type = other DNA
tactcacttctcctgagctagg

SEQ ID NO: 52495 - DNA, 22 bp, synthetic construct
  misc_feature 1..22: note = chemically synthesized
  source 1..22: mol_type = other DNA
acttctcctgagctaggctgct

SEQ ID NO: 52496 - DNA, 22 bp, synthetic construct
  misc_feature 1..22: note = chemically synthesized
  source 1..22: mol_type = other DNA
ctcctgagctaggctgcttatc

SEQ ID NO: 52497 - DNA, 22 bp, synthetic construct
  misc_feature 1..22: note = chemically synthesized
  source 1..22: mol_type = other DNA
tcctgagctaggctgcttatcc

SEQ ID NO: 52498 - DNA, 22 bp, synthetic construct
  misc_feature 1..22: note = chemically synthesized
  source 1..22: mol_type = other DNA
ctgagctaggctgcttatccct

SEQ ID NO: 52499 - DNA, 22 bp, synthetic construct
  misc_feature 1..22: note = chemically synthesized
  source 1..22: mol_type = other DNA
agctaggctgcttatccctgcc

SEQ ID NO: 52500 - DNA, 22 bp, synthetic construct
  misc_feature 1..22: note = chemically synthesized
  source 1..22: mol_type = other DNA
ggctgcttatccctgccaatct

SEQ ID NO: 52501 - DNA, 22 bp, synthetic construct
  misc_feature 1..22: note = chemically synthesized
  source 1..22: mol_type = other DNA
cttatccctgccaatctgactg

SEQ ID NO: 52502 - DNA, 22 bp, synthetic construct
  misc_feature 1..22: note = chemically synthesized
  source 1..22: mol_type = other DNA
atccctgccaatctgactgcaa

SEQ ID NO: 52503 - DNA, 22 bp, synthetic construct
  misc_feature 1..22: note = chemically synthesized
  source 1..22: mol_type = other DNA
tccctgccaatctgactgcaaa

SEQ ID NO: 52504 - DNA, 22 bp, synthetic construct
  misc_feature 1..22: note = chemically synthesized
  source 1..22: mol_type = other DNA
ccaatctgactgcaaacctgct

SEQ ID NO: 52505 - DNA, 22 bp, synthetic construct
  misc_feature 1..22: note = chemically synthesized
  source 1..22: mol_type = other DNA
actgcaaacctgctgattctga

SEQ ID NO: 52506 - DNA, 22 bp, synthetic construct
  misc_feature 1..22: note = chemically synthesized
  source 1..22: mol_type = other DNA
caaacctgctgattctgattat

SEQ ID NO: 52507 - DNA, 22 bp, synthetic construct
  misc_feature 1..22: note = chemically synthesized
  source 1..22: mol_type = other DNA
ctgattctgattattgacttag

SEQ ID NO: 52508 - DNA, 22 bp, synthetic construct
  misc_feature 1..22: note = chemically synthesized
  source 1..22: mol_type = other DNA
attctgattattgacttagtca

SEQ ID NO: 52509 - DNA, 20 bp, synthetic construct
  misc_feature 1..20: note = chemically synthesized
  source 1..20: mol_type = other DNA
ggtttggtggtgtgcgcctg

SEQ ID NO: 52510 - DNA, 20 bp, synthetic construct
  misc_feature 1..20: note = chemically synthesized
  source 1..20: mol_type = other DNA
gtttggtggtgtgcgcctgt

SEQ ID NO: 52511 - DNA, 20 bp, synthetic construct
  misc_feature 1..20: note = chemically synthesized
  source 1..20: mol_type = other DNA
gtggtgtgcgcctgtaggcc

SEQ ID NO: 52512 - DNA, 20 bp, synthetic construct
  misc_feature 1..20: note = chemically synthesized
  source 1..20: mol_type = other DNA
cgcctgtaggcccagctacc

SEQ ID NO: 52513 - DNA, 20 bp, synthetic construct
  misc_feature 1..20: note = chemically synthesized
  source 1..20: mol_type = other DNA
cctgtaggcccagctaccca

SEQ ID NO: 52514 - DNA, 20 bp, synthetic construct
  misc_feature 1..20: note = chemically synthesized
  source 1..20: mol_type = other DNA
ctgatgcaaaacgatccctt

SEQ ID NO: 52515 - DNA, 20 bp, synthetic construct
  misc_feature 1..20: note = chemically synthesized
  source 1..20: mol_type = other DNA
gcaaaacgatcccttaagcc

SEQ ID NO: 52516 - DNA, 20 bp, synthetic construct
  misc_feature 1..20: note = chemically synthesized
  source 1..20: mol_type = other DNA
caaaacgatcccttaagccc

SEQ ID NO: 52517 - DNA, 20 bp, synthetic construct
  misc_feature 1..20: note = chemically synthesized
  source 1..20: mol_type = other DNA
aaacgatcccttaagcccag

SEQ ID NO: 52518 - DNA, 20 bp, synthetic construct
  misc_feature 1..20: note = chemically synthesized
  source 1..20: mol_type = other DNA
tcccttaagcccaggagact

SEQ ID NO: 52519 - DNA, 20 bp, synthetic construct
  misc_feature 1..20: note = chemically synthesized
  source 1..20: mol_type = other DNA
cccttaagcccaggagactg

SEQ ID NO: 52520 - DNA, 20 bp, synthetic construct
  misc_feature 1..20: note = chemically synthesized
  source 1..20: mol_type = other DNA
agcccaggagactgaggctg

SEQ ID NO: 52521 - DNA, 20 bp, synthetic construct
  misc_feature 1..20: note = chemically synthesized
  source 1..20: mol_type = other DNA
caggagactgaggctgcagt

SEQ ID NO: 52522 - DNA, 20 bp, synthetic construct
  misc_feature 1..20: note = chemically synthesized
  source 1..20: mol_type = other DNA
gaggctgcagtgagctgtga

SEQ ID NO: 52523 - DNA, 20 bp, synthetic construct
  misc_feature 1..20: note = chemically synthesized
  source 1..20: mol_type = other DNA
gtgatggtgccaccgcactc

SEQ ID NO: 52524 - DNA, 20 bp, synthetic construct
  misc_feature 1..20: note = chemically synthesized
  source 1..20: mol_type = other DNA
ggtgccaccgcactccagcc

SEQ ID NO: 52525 - DNA, 20 bp, synthetic construct
  misc_feature 1..20: note = chemically synthesized
  source 1..20: mol_type = other DNA
gtgccaccgcactccagcct

SEQ ID NO: 52526 - DNA, 20 bp, synthetic construct
  misc_feature 1..20: note = chemically synthesized
  source 1..20: mol_type = other DNA
ccgcactccagcctgggtaa

SEQ ID NO: 52527 - DNA, 20 bp, synthetic construct
  misc_feature 1..20: note = chemically synthesized
  source 1..20: mol_type = other DNA
gcactccagcctgggtaaca

SEQ ID NO: 52528 - DNA, 20 bp, synthetic construct
  misc_feature 1..20: note = chemically synthesized
  source 1..20: mol_type = other DNA
tccagcctgggtaacagagt

SEQ ID NO: 52529 - DNA, 20 bp, synthetic construct
  misc_feature 1..20: note = chemically synthesized
  source 1..20: mol_type = other DNA
gagaccccgtctcaaataaa

SEQ ID NO: 52530 - DNA, 20 bp, synthetic construct
  misc_feature 1..20: note = chemically synthesized
  source 1..20: mol_type = other DNA
tctcaaataaacagataaat

SEQ ID NO: 52531 - DNA, 20 bp, synthetic construct
  misc_feature 1..20: note = chemically synthesized
  source 1..20: mol_type = other DNA
caaataaacagataaatgag

SEQ ID NO: 52532 - DNA, 20 bp, synthetic construct
  misc_feature 1..20: note = chemically synthesized
  source 1..20: mol_type = other DNA
cagataaatgagtggattct

SEQ ID NO: 52533 - DNA, 20 bp, synthetic construct
  misc_feature 1..20: note = chemically synthesized
  source 1..20: mol_type = other DNA
tggattctcagcaaaacttc

SEQ ID NO: 52534 - DNA, 20 bp, synthetic construct
  misc_feature 1..20: note = chemically synthesized
  source 1..20: mol_type = other DNA
cactcgcctcatatatccac

SEQ ID NO: 52535 - DNA, 20 bp, synthetic construct
  misc_feature 1..20: note = chemically synthesized
  source 1..20: mol_type = other DNA
catatatccacaagaccttt

SEQ ID NO: 52536 - DNA, 20 bp, synthetic construct
  misc_feature 1..20: note = chemically synthesized
  source 1..20: mol_type = other DNA
acaagacctttgagaatcca

SEQ ID NO: 52537 - DNA, 20 bp, synthetic construct
  misc_feature 1..20: note = chemically synthesized
  source 1..20: mol_type = other DNA
gaatccacggtgtctcgatg

SEQ ID NO: 52538 - DNA, 20 bp, synthetic construct
  misc_feature 1..20: note = chemically synthesized
  source 1..20: mol_type = other DNA
ccacggtgtctcgatgcagt

SEQ ID NO: 52539 - DNA, 20 bp, synthetic construct
  misc_feature 1..20: note = chemically synthesized
  source 1..20: mol_type = other DNA
gatgcagtcagctttctaac

SEQ ID NO: 52540 - DNA, 20 bp, synthetic construct
  misc_feature 1..20: note = chemically synthesized
  source 1..20: mol_type = other DNA
cagtcagctttctaacaagc

SEQ ID NO: 52541 - DNA, 20 bp, synthetic construct
  misc_feature 1..20: note = chemically synthesized
  source 1..20: mol_type = other DNA
agtcagctttctaacaagct

SEQ ID NO: 52542 - DNA, 20 bp, synthetic construct
  misc_feature 1..20: note = chemically synthesized
  source 1..20: mol_type = other DNA
gtcagctttctaacaagctg

SEQ ID NO: 52543 - DNA, 20 bp, synthetic construct
  misc_feature 1..20: note = chemically synthesized
  source 1..20: mol_type = other DNA
gggcctcacctgttttccca

SEQ ID NO: 52544 - DNA, 20 bp, synthetic construct
  misc_feature 1..20: note = chemically synthesized
  source 1..20: mol_type = other DNA
tcccacggataaaaacgtgc

SEQ ID NO: 52545 - DNA, 20 bp, synthetic construct
  misc_feature 1..20: note = chemically synthesized
  source 1..20: mol_type = other DNA
ccacggataaaaacgtgctg

SEQ ID NO: 52546 - DNA, 20 bp, synthetic construct
  misc_feature 1..20: note = chemically synthesized
  source 1..20: mol_type = other DNA
cacggataaaaacgtgctgg

SEQ ID NO: 52547 - DNA, 20 bp, synthetic construct
  misc_feature 1..20: note = chemically synthesized
  source 1..20: mol_type = other DNA
ggataaaaacgtgctggagg

SEQ ID NO: 52548 - DNA, 20 bp, synthetic construct
  misc_feature 1..20: note = chemically synthesized
  source 1..20: mol_type = other DNA
taaaaacgtgctggaggaag

SEQ ID NO: 52549 - DNA, 20 bp, synthetic construct
  misc_feature 1..20: note = chemically synthesized
  source 1..20: mol_type = other DNA
aacgtgctggaggaagcaga

SEQ ID NO: 52550 - DNA, 20 bp, synthetic construct
  misc_feature 1..20: note = chemically synthesized
  source 1..20: mol_type = other DNA
acgtgctggaggaagcagaa

SEQ ID NO: 52551 - DNA, 20 bp, synthetic construct
  misc_feature 1..20: note = chemically synthesized
  source 1..20: mol_type = other DNA
cgtgctggaggaagcagaaa

SEQ ID NO: 52552 - DNA, 20 bp, synthetic construct
  misc_feature 1..20: note = chemically synthesized
  source 1..20: mol_type = other DNA
gtgctggaggaagcagaaag

SEQ ID NO: 52553 - DNA, 20 bp, synthetic construct
  misc_feature 1..20: note = chemically synthesized
  source 1..20: mol_type = other DNA
tggaggaagcagaaaggggc

SEQ ID NO: 52554 - DNA, 20 bp, synthetic construct
  misc_feature 1..20: note = chemically synthesized
  source 1..20: mol_type = other DNA
aggaagcagaaaggggctgg

SEQ ID NO: 52555 - DNA, 20 bp, synthetic construct
  misc_feature 1..20: note = chemically synthesized
  source 1..20: mol_type = other DNA
ggaagcagaaaggggctggc

SEQ ID NO: 52556 - DNA, 20 bp, synthetic construct
  misc_feature 1..20: note = chemically synthesized
  source 1..20: mol_type = other DNA
agcagaaaggggctggcagg

SEQ ID NO: 52557 - DNA, 20 bp, synthetic construct
  misc_feature 1..20: note = chemically synthesized
  source 1..20: mol_type = other DNA
gaaaggggctggcaggtgga

SEQ ID NO: 52558 - DNA, 20 bp, synthetic construct
  misc_feature 1..20: note = chemically synthesized
  source 1..20: mol_type = other DNA
gggctggcaggtggaaagat

SEQ ID NO: 52559 - DNA, 20 bp, synthetic construct
  misc_feature 1..20: note = chemically synthesized
  source 1..20: mol_type = other DNA
ggctggcaggtggaaagatg

SEQ ID NO: 52560 - DNA, 20 bp, synthetic construct
  misc_feature 1..20: note = chemically synthesized
  source 1..20: mol_type = other DNA
gcaggtggaaagatgaggac

SEQ ID NO: 52561 - DNA, 20 bp, synthetic construct
  misc_feature 1..20: note = chemically synthesized
  source 1..20: mol_type = other DNA
gctcatcgtctcatgactat

SEQ ID NO: 52562 - DNA, 20 bp, synthetic construct
  misc_feature 1..20: note = chemically synthesized
  source 1..20: mol_type = other DNA
ctcatcgtctcatgactatg

SEQ ID NO: 52563 - DNA, 20 bp, synthetic construct
  misc_feature 1..20: note = chemically synthesized
  source 1..20: mol_type = other DNA
actatgaggttgctctgatc

SEQ ID NO: 52564 - DNA, 20 bp, synthetic construct
  misc_feature 1..20: note = chemically synthesized
  source 1..20: mol_type = other DNA
tatgaggttgctctgatcca

SEQ ID NO: 52565 - DNA, 20 bp, synthetic construct
  misc_feature 1..20: note = chemically synthesized
  source 1..20: mol_type = other DNA
atgaggttgctctgatccag

SEQ ID NO: 52566 - DNA, 20 bp, synthetic construct
  misc_feature 1..20: note = chemically synthesized
  source 1..20: mol_type = other DNA
tgaggttgctctgatccaga

SEQ ID NO: 52567 - DNA, 20 bp, synthetic construct
  misc_feature 1..20: note = chemically synthesized
  source 1..20: mol_type = other DNA
atccagagggtccccctgcc

SEQ ID NO: 52568 - DNA, 20 bp, synthetic construct
  misc_feature 1..20: note = chemically synthesized
  source 1..20: mol_type = other DNA
cagagggtccccctgcctgg

SEQ ID NO: 52569 - DNA, 20 bp, synthetic construct
  misc_feature 1..20: note = chemically synthesized
  source 1..20: mol_type = other DNA
cctgcctggtggcccaccgc

SEQ ID NO: 52570 - DNA, 20 bp, synthetic construct
  misc_feature 1..20: note = chemically synthesized
  source 1..20: mol_type = other DNA
ctgcctggtggcccaccgcc

SEQ ID NO: 52571 - DNA, 20 bp, synthetic construct
  misc_feature 1..20: note = chemically synthesized
  source 1..20: mol_type = other DNA
cctggtggcccaccgccagg

SEQ ID NO: 52572 - DNA, 20 bp, synthetic construct
  misc_feature 1..20: note = chemically synthesized
  source 1..20: mol_type = other DNA
aggaagactcccactgtccc

SEQ ID NO: 52573 - DNA, 20 bp, synthetic construct
  misc_feature 1..20: note = chemically synthesized
  source 1..20: mol_type = other DNA
tcccactgtccctggatgcc

SEQ ID NO: 52574 - DNA, 20 bp, synthetic construct
  misc_feature 1..20: note = chemically synthesized
  source 1..20: mol_type = other DNA
ccactgtccctggatgccca

SEQ ID NO: 52575 - DNA, 20 bp, synthetic construct
  misc_feature 1..20: note = chemically synthesized
  source 1..20: mol_type = other DNA
ctgtccctggatgcccagag

SEQ ID NO: 52576 - DNA, 20 bp, synthetic construct
  misc_feature 1..20: note = chemically synthesized
  source 1..20: mol_type = other DNA
tgtccctggatgcccagagt

SEQ ID NO: 52577 - DNA, 20 bp, synthetic construct
  misc_feature 1..20: note = chemically synthesized
  source 1..20: mol_type = other DNA
acttatcaactccttatcca

SEQ ID NO: 52578 - DNA, 20 bp, synthetic construct
  misc_feature 1..20: note = chemically synthesized
  source 1..20: mol_type = other DNA
cttatcaactccttatccat

SEQ ID NO: 52579 - DNA, 20 bp, synthetic construct
  misc_feature 1..20: note = chemically synthesized
  source 1..20: mol_type = other DNA
ttatcaactccttatccata

SEQ ID NO: 52580 - DNA, 20 bp, synthetic construct
  misc_feature 1..20: note = chemically synthesized
  source 1..20: mol_type = other DNA
tatcaactccttatccatag

SEQ ID NO: 52581 - DNA, 20 bp, synthetic construct
  misc_feature 1..20: note = chemically synthesized
  source 1..20: mol_type = other DNA
tccataggggtattcttcct

SEQ ID NO: 52582 - DNA, 20 bp, synthetic construct
  misc_feature 1..20: note = chemically synthesized
  source 1..20: mol_type = other DNA
ccataggggtattcttcctg

SEQ ID NO: 52583 - DNA, 20 bp, synthetic construct
  misc_feature 1..20: note = chemically synthesized
  source 1..20: mol_type = other DNA
gtattcttcctgaggcgtct

SEQ ID NO: 52584 - DNA, 20 bp, synthetic construct
  misc_feature 1..20: note = chemically synthesized
  source 1..20: mol_type = other DNA
tcctgaggcgtctcagaaaa

SEQ ID NO: 52585 - DNA, 20 bp, synthetic construct
  misc_feature 1..20: note = chemically synthesized
  source 1..20: mol_type = other DNA
cctgaggcgtctcagaaaac

SEQ ID NO: 52586 - DNA, 20 bp, synthetic construct
  misc_feature 1..20: note = chemically synthesized
  source 1..20: mol_type = other DNA
ctgaggcgtctcagaaaaca

SEQ ID NO: 52587 - DNA, 20 bp, synthetic construct
  misc_feature 1..20: note = chemically synthesized
  source 1..20: mol_type = other DNA
cccatatgctgaccacataa

SEQ ID NO: 52588 - DNA, 20 bp, synthetic construct
  misc_feature 1..20: note = chemically synthesized
  source 1..20: mol_type = other DNA
taatagaacccctcccaact

SEQ ID NO: 52589 - DNA, 20 bp, synthetic construct
  misc_feature 1..20: note = chemically synthesized
  source 1..20: mol_type = other DNA
atagaacccctcccaactca

SEQ ID NO: 52590 - DNA, 20 bp, synthetic construct
  misc_feature 1..20: note = chemically synthesized
  source 1..20: mol_type = other DNA
ccctcccaactcagagaccc

SEQ ID NO: 52591 - DNA, 20 bp, synthetic construct
  misc_feature 1..20: note = chemically synthesized
  source 1..20: mol_type = other DNA
aactcagagaccctggctgc

SEQ ID NO: 52592 - DNA, 20 bp, synthetic construct
  misc_feature 1..20: note = chemically synthesized
  source 1..20: mol_type = other DNA
accctggctgctagctgccc

SEQ ID NO: 52593 - DNA, 20 bp, synthetic construct
  misc_feature 1..20: note = chemically synthesized
  source 1..20: mol_type = other DNA
ctagctgccctggcatgacc

SEQ ID NO: 52594 - DNA, 20 bp, synthetic construct
  misc_feature 1..20: note = chemically synthesized
  source 1..20: mol_type = other DNA
ctgccctggcatgacccaga

SEQ ID NO: 52595 - DNA, 20 bp, synthetic construct
  misc_feature 1..20: note = chemically synthesized
  source 1..20: mol_type = other DNA
ccctggcatgacccagacag

SEQ ID NO: 52596 - DNA, 20 bp, synthetic construct
  misc_feature 1..20: note = chemically synthesized
  source 1..20: mol_type = other DNA
gtggcctttgtatatgtttt

SEQ ID NO: 52597 - DNA, 20 bp, synthetic construct
  misc_feature 1..20: note = chemically synthesized
  source 1..20: mol_type = other DNA
ccttgactcacctctgacca

SEQ ID NO: 52598 - DNA, 20 bp, synthetic construct
  misc_feature 1..20: note = chemically synthesized
  source 1..20: mol_type = other DNA
gaccatagaaactctcatcc

SEQ ID NO: 52599 - DNA, 20 bp, synthetic construct
  misc_feature 1..20: note = chemically synthesized
  source 1..20: mol_type = other DNA
ccatagaaactctcatccca

SEQ ID NO: 52600 - DNA, 20 bp, synthetic construct
  misc_feature 1..20: note = chemically synthesized
  source 1..20: mol_type = other DNA
catagaaactctcatcccag

SEQ ID NO: 52601 - DNA, 20 bp, synthetic construct
  misc_feature 1..20: note = chemically synthesized
  source 1..20: mol_type = other DNA
catcccagaggtcactgcaa

SEQ ID NO: 52602 - DNA, 20 bp, synthetic construct
  misc_feature 1..20: note = chemically synthesized
  source 1..20: mol_type = other DNA
ctgcaatagttactccacaa

SEQ ID NO: 52603 - DNA, 20 bp, synthetic construct
  misc_feature 1..20: note = chemically synthesized
  source 1..20: mol_type = other DNA
gcaatagttactccacaaca

SEQ ID NO: 52604 - DNA, 20 bp, synthetic construct
  misc_feature 1..20: note = chemically synthesized
  source 1..20: mol_type = other DNA
caatagttactccacaacag

SEQ ID NO: 52605 - DNA, 20 bp, synthetic construct
  misc_feature 1..20: note = chemically synthesized
  source 1..20: mol_type = other DNA
ctccacaacagaggcttatc

SEQ ID NO: 52606 - DNA, 20 bp, synthetic construct
  misc_feature 1..20: note = chemically synthesized
  source 1..20: mol_type = other DNA
tccacaacagaggcttatct

SEQ ID NO: 52607 - DNA, 20 bp, synthetic construct
  misc_feature 1..20: note = chemically synthesized
  source 1..20: mol_type = other DNA
acaacagaggcttatctggg

SEQ ID NO: 52608 - DNA, 20 bp, synthetic construct
  misc_feature 1..20: note = chemically synthesized
  source 1..20: mol_type = other DNA
aacagaggcttatctgggta

SEQ ID NO: 52609 - DNA, 20 bp, synthetic construct
  misc_feature 1..20: note = chemically synthesized
  source 1..20: mol_type = other DNA
acagaggcttatctgggtag

SEQ ID NO: 52610 - DNA, 20 bp, synthetic construct
  misc_feature 1..20: note = chemically synthesized
  source 1..20: mol_type = other DNA
cagaggcttatctgggtaga

SEQ ID NO: 52611 - DNA, 20 bp, synthetic construct
  misc_feature 1..20: note = chemically synthesized
  source 1..20: mol_type = other DNA
gaggcttatctgggtagagg

SEQ ID NO: 52612 - DNA, 20 bp, synthetic construct
  misc_feature 1..20: note = chemically synthesized
  source 1..20: mol_type = other DNA
aggcttatctgggtagaggg

SEQ ID NO: 52613 - DNA, 20 bp, synthetic construct
  misc_feature 1..20: note = chemically synthesized
  source 1..20: mol_type = other DNA
agagggaggctccctaccta

SEQ ID NO: 52614 - DNA, 20 bp, synthetic construct
  misc_feature 1..20: note = chemically synthesized
  source 1..20: mol_type = other DNA
gaggctccctacctatggcc

SEQ ID NO: 52615 - DNA, 20 bp, synthetic construct
  misc_feature 1..20: note = chemically synthesized
  source 1..20: mol_type = other DNA
gctccctacctatggcccag

SEQ ID NO: 52616 - DNA, 20 bp, synthetic construct
  misc_feature 1..20: note = chemically synthesized
  source 1..20: mol_type = other DNA
ctatggcccagcagccctga

SEQ ID NO: 52617 - DNA, 20 bp, synthetic construct
  misc_feature 1..20: note = chemically synthesized
  source 1..20: mol_type = other DNA
gcccagcagccctgacagtg

SEQ ID NO: 52618 - DNA, 20 bp, synthetic construct
  misc_feature 1..20: note = chemically synthesized
  source 1..20: mol_type = other DNA
atcacatataccccacgccc

SEQ ID NO: 52619 - DNA, 20 bp, synthetic construct
  misc_feature 1..20: note = chemically synthesized
  source 1..20: mol_type = other DNA
ccagcactgcctgccacgca

SEQ ID NO: 52620 - DNA, 20 bp, synthetic construct
  misc_feature 1..20: note = chemically synthesized
  source 1..20: mol_type = other DNA
cagcactgcctgccacgcat

SEQ ID NO: 52621 - DNA, 20 bp, synthetic construct
  misc_feature 1..20: note = chemically synthesized
  source 1..20: mol_type = other DNA
gcttactttacacccaccca

SEQ ID NO: 52622 - DNA, 20 bp, synthetic construct
  misc_feature 1..20: note = chemically synthesized
  source 1..20: mol_type = other DNA
caacacattacctgctctcc

SEQ ID NO: 52623 - DNA, 20 bp, synthetic construct
  misc_feature 1..20: note = chemically synthesized
  source 1..20: mol_type = other DNA
aacacattacctgctctcca

SEQ ID NO: 52624 - DNA, 20 bp, synthetic construct
  misc_feature 1..20: note = chemically synthesized
  source 1..20: mol_type = other DNA
cattacctgctctccaaggt

SEQ ID NO: 52625 - DNA, 20 bp, synthetic construct
  misc_feature 1..20: note = chemically synthesized
  source 1..20: mol_type = other DNA
attacctgctctccaaggtt

SEQ ID NO: 52626 - DNA, 20 bp, synthetic construct
  misc_feature 1..20: note = chemically synthesized
  source 1..20: mol_type = other DNA
ctgctctccaaggttaggcg

SEQ ID NO: 52627 - DNA, 20 bp, synthetic construct
  misc_feature 1..20: note = chemically synthesized
  source 1..20: mol_type = other DNA
ctctccaaggttaggcgtgg

SEQ ID NO: 52628 - DNA, 20 bp, synthetic construct
  misc_feature 1..20: note = chemically synthesized
  source 1..20: mol_type = other DNA
tctccaaggttaggcgtggc

SEQ ID NO: 52629 - DNA, 20 bp, synthetic construct
  misc_feature 1..20: note = chemically synthesized
  source 1..20: mol_type = other DNA
tccaaggttaggcgtggcag

SEQ ID NO: 52630 - DNA, 20 bp, synthetic construct
  misc_feature 1..20: note = chemically synthesized
  source 1..20: mol_type = other DNA
aaggttaggcgtggcaggag

SEQ ID NO: 52631 - DNA, 20 bp, synthetic construct
  misc_feature 1..20: note = chemically synthesized
  source 1..20: mol_type = other DNA
cgtggcaggagaagtttgct

SEQ ID NO: 52632 - DNA, 20 bp, synthetic construct
  misc_feature 1..20: note = chemically synthesized
  source 1..20: mol_type = other DNA
caggagaagtttgcttggac

SEQ ID NO: 52633 - DNA, 20 bp, synthetic construct
  misc_feature 1..20: note = chemically synthesized
  source 1..20: mol_type = other DNA
gagaagtttgcttggaccag

SEQ ID NO: 52634 - DNA, 20 bp, synthetic construct
  misc_feature 1..20: note = chemically synthesized
  source 1..20: mol_type = other DNA
ttggaccagcagaaaccatg

SEQ ID NO: 52635 - DNA, 20 bp, synthetic construct
  misc_feature 1..20: note = chemically synthesized
  source 1..20: mol_type = other DNA
ccagcagaaaccatgcagtc

SEQ ID NO: 52636 - DNA, 20 bp, synthetic construct
  misc_feature 1..20: note = chemically synthesized
  source 1..20: mol_type = other DNA
cagcagaaaccatgcagtca

SEQ ID NO: 52637 - DNA, 20 bp, synthetic construct
  misc_feature 1..20: note = chemically synthesized
  source 1..20: mol_type = other DNA
accatgcagtcaaggacaac

SEQ ID NO: 52638 - DNA, 20 bp, synthetic construct
  misc_feature 1..20: note = chemically synthesized
  source 1..20: mol_type = other DNA
catgcagtcaaggacaactg

SEQ ID NO: 52639 - DNA, 20 bp, synthetic construct
  misc_feature 1..20: note = chemically synthesized
  source 1..20: mol_type = other DNA
cagtcaaggacaactggagt

SEQ ID NO: 52640 - DNA, 20 bp, synthetic construct
  misc_feature 1..20: note = chemically synthesized
  source 1..20: mol_type = other DNA
aaggacaactggagtcagca

SEQ ID NO: 52641 - DNA, 20 bp, synthetic construct
  misc_feature 1..20: note = chemically synthesized
  source 1..20: mol_type = other DNA
aggacaactggagtcagcat

SEQ ID NO: 52642 - DNA, 20 bp, synthetic construct
  misc_feature 1..20: note = chemically synthesized
  source 1..20: mol_type = other DNA
caactggagtcagcatgggc

SEQ ID NO: 52643 - DNA, 20 bp, synthetic construct
  misc_feature 1..20: note = chemically synthesized
  source 1..20: mol_type = other DNA
aactggagtcagcatgggct

SEQ ID NO: 52644 - DNA, 20 bp, synthetic construct
  misc_feature 1..20: note = chemically synthesized
  source 1..20: mol_type = other DNA
agtcagcatgggctgggtgc

SEQ ID NO: 52645 - DNA, 20 bp, synthetic construct
  misc_feature 1..20: note = chemically synthesized
  source 1..20: mol_type = other DNA
atgggctgggtgcgagccct

SEQ ID NO: 52646 - DNA, 20 bp, synthetic construct
  misc_feature 1..20: note = chemically synthesized
  source 1..20: mol_type = other DNA
ggctgggtgcgagcccttgg

SEQ ID NO: 52647 - DNA, 20 bp, synthetic construct
  misc_feature 1..20: note = chemically synthesized
  source 1..20: mol_type = other DNA
gctgggtgcgagcccttggt

SEQ ID NO: 52648 - DNA, 20 bp, synthetic construct
  misc_feature 1..20: note = chemically synthesized
  source 1..20: mol_type = other DNA
ctgggtgcgagcccttggtg

SEQ ID NO: 52649 - DNA, 20 bp, synthetic construct
  misc_feature 1..20: note = chemically synthesized
  source 1..20: mol_type = other DNA
ggtgcgagcccttggtgggg

SEQ ID NO: 52650 - DNA, 20 bp, synthetic construct
  misc_feature 1..20: note = chemically synthesized
  source 1..20: mol_type = other DNA
gtgcgagcccttggtggggt

SEQ ID NO: 52651 - DNA, 20 bp, synthetic construct
  misc_feature 1..20: note = chemically synthesized
  source 1..20: mol_type = other DNA
tgcgagcccttggtggggtg

SEQ ID NO: 52652 - DNA, 20 bp, synthetic construct
  misc_feature 1..20: note = chemically synthesized
  source 1..20: mol_type = other DNA
cgagcccttggtggggtggg

SEQ ID NO: 52653 - DNA, 20 bp, synthetic construct
  misc_feature 1..20: note = chemically synthesized
  source 1..20: mol_type = other DNA
gagcccttggtggggtgggg

SEQ ID NO: 52654 - DNA, 20 bp, synthetic construct
  misc_feature 1..20: note = chemically synthesized
  source 1..20: mol_type = other DNA
gcccttggtggggtggggag

SEQ ID NO: 52655 - DNA, 20 bp, synthetic construct
  misc_feature 1..20: note = chemically synthesized
  source 1..20: mol_type = other DNA
gtggggtggggaggagactc

SEQ ID NO: 52656 - DNA, 20 bp, synthetic construct
  misc_feature 1..20: note = chemically synthesized
  source 1..20: mol_type = other DNA
tggggtggggaggagactcc

SEQ ID NO: 52657 - DNA, 20 bp, synthetic construct
  misc_feature 1..20: note = chemically synthesized
  source 1..20: mol_type = other DNA
agactccaggtcatacctcc

SEQ ID NO: 52658 - DNA, 20 bp, synthetic construct
  misc_feature 1..20: note = chemically synthesized
  source 1..20: mol_type = other DNA
actccaggtcatacctcctg

SEQ ID NO: 52659 - DNA, 20 bp, synthetic construct
  misc_feature 1..20: note = chemically synthesized
  source 1..20: mol_type = other DNA
ctccaggtcatacctcctgg

SEQ ID NO: 52660 - DNA, 20 bp, synthetic construct
  misc_feature 1..20: note = chemically synthesized
  source 1..20: mol_type = other DNA
gaggatgttttaatcatttc

SEQ ID NO: 52661 - DNA, 20 bp, synthetic construct
  misc_feature 1..20: note = chemically synthesized
  source 1..20: mol_type = other DNA
tgttttaatcatttccagca

SEQ ID NO: 52662 - DNA, 20 bp, synthetic construct
  misc_feature 1..20: note = chemically synthesized
  source 1..20: mol_type = other DNA
aatgctgtcaacttttgcca

SEQ ID NO: 52663 - DNA, 20 bp, synthetic construct
  misc_feature 1..20: note = chemically synthesized
  source 1..20: mol_type = other DNA
aacttttgccacagattcat

SEQ ID NO: 52664 - DNA, 20 bp, synthetic construct
  misc_feature 1..20: note = chemically synthesized
  source 1..20: mol_type = other DNA
gccacagattcattagctct

SEQ ID NO: 52665 - DNA, 20 bp, synthetic construct
  misc_feature 1..20: note = chemically synthesized
  source 1..20: mol_type = other DNA
gagtttcttttttctgtccc

SEQ ID NO: 52666 - DNA, 20 bp, synthetic construct
  misc_feature 1..20: note = chemically synthesized
  source 1..20: mol_type = other DNA
ctaccccttacatgtcaata

SEQ ID NO: 52667 - DNA, 20 bp, synthetic construct
  misc_feature 1..20: note = chemically synthesized
  source 1..20: mol_type = other DNA
tgtcaatatggacttaatga

SEQ ID NO: 52668 - DNA, 20 bp, synthetic construct
  misc_feature 1..20: note = chemically synthesized
  source 1..20: mol_type = other DNA
gtcaatatggacttaatgat

SEQ ID NO: 52669 - DNA, 20 bp, synthetic construct
  misc_feature 1..20: note = chemically synthesized
  source 1..20: mol_type = other DNA
ggacttaatgatgggaaatt

SEQ ID NO: 52670 - DNA, 20 bp, synthetic construct
  misc_feature 1..20: note = chemically synthesized
  source 1..20: mol_type = other DNA
gacttaatgatgggaaattc

SEQ ID NO: 52671 - DNA, 20 bp, synthetic construct
  misc_feature 1..20: note = chemically synthesized
  source 1..20: mol_type = other DNA
taatgatgggaaattcaggc

SEQ ID NO: 52672 - DNA, 20 bp, synthetic construct
  misc_feature 1..20: note = chemically synthesized
  source 1..20: mol_type = other DNA
tttaaacattttattccccc

SEQ ID NO: 52673 - DNA, 20 bp, synthetic construct
  misc_feature 1..20: note = chemically synthesized
  source 1..20: mol_type = other DNA
cctcaaaaaatgcatgaatt

SEQ ID NO: 52674 - DNA, 20 bp, synthetic construct
  misc_feature 1..20: note = chemically synthesized
  source 1..20: mol_type = other DNA
tcaaaaaatgcatgaatttg

SEQ ID NO: 52675 - DNA, 20 bp, synthetic construct
  misc_feature 1..20: note = chemically synthesized
  source 1..20: mol_type = other DNA
caaaaaatgcatgaatttgg

SEQ ID NO: 52676 - DNA, 20 bp, synthetic construct
  misc_feature 1..20: note = chemically synthesized
  source 1..20: mol_type = other DNA
aaaatgcatgaatttggagg

SEQ ID NO: 52677 - DNA, 20 bp, synthetic construct
  misc_feature 1..20: note = chemically synthesized
  source 1..20: mol_type = other DNA
atgcatgaatttggaggcag

SEQ ID NO: 52678 - DNA, 20 bp, synthetic construct
  misc_feature 1..20: note = chemically synthesized
  source 1..20: mol_type = other DNA
ctgtaatcccaatgctttgc

SEQ ID NO: 52679 - DNA, 20 bp, synthetic construct
  misc_feature 1..20: note = chemically synthesized
  source 1..20: mol_type = other DNA
tgtaatcccaatgctttgct

SEQ ID NO: 52680 - DNA, 20 bp, synthetic construct
  misc_feature 1..20: note = chemically synthesized
  source 1..20: mol_type = other DNA
tcccaatgctttgctaggtt

SEQ ID NO: 52681 - DNA, 20 bp, synthetic construct
  misc_feature 1..20: note = chemically synthesized
  source 1..20: mol_type = other DNA
cccaatgctttgctaggttg

SEQ ID NO: 52682 - DNA, 20 bp, synthetic construct
  misc_feature 1..20: note = chemically synthesized
  source 1..20: mol_type = other DNA
aatgctttgctaggttgagg

SEQ ID NO: 52683 - DNA, 20 bp, synthetic construct
  misc_feature 1..20: note = chemically synthesized
  source 1..20: mol_type = other DNA
atgctttgctaggttgaggc

SEQ ID NO: 52684 - DNA, 20 bp, synthetic construct
  misc_feature 1..20: note = chemically synthesized
  source 1..20: mol_type = other DNA
gctttgctaggttgaggcgg

SEQ ID NO: 52685 - DNA, 20 bp, synthetic construct
  misc_feature 1..20: note = chemically synthesized
  source 1..20: mol_type = other DNA
ctttgctaggttgaggcggg

SEQ ID NO: 52686 - DNA, 20 bp, synthetic construct
  misc_feature 1..20: note = chemically synthesized
  source 1..20: mol_type = other DNA
tgaggcgggaggatcacttg

SEQ ID NO: 52687 - DNA, 20 bp, synthetic construct
  misc_feature 1..20: note = chemically synthesized
  source 1..20: mol_type = other DNA
gcgggaggatcacttgaagc

SEQ ID NO: 52688 - DNA, 20 bp, synthetic construct
  misc_feature 1..20: note = chemically synthesized
  source 1..20: mol_type = other DNA
cgggaggatcacttgaagcc

SEQ ID NO: 52689 - DNA, 20 bp, synthetic construct
  misc_feature 1..20: note = chemically synthesized
  source 1..20: mol_type = other DNA
tcacttgaagccaggaattt

SEQ ID NO: 52690 - DNA, 20 bp, synthetic construct
  misc_feature 1..20: note = chemically synthesized
  source 1..20: mol_type = other DNA
tgaagccaggaatttgagac

SEQ ID NO: 52691 - DNA, 20 bp, synthetic construct
  misc_feature 1..20: note = chemically synthesized
  source 1..20: mol_type = other DNA
ccaggaatttgagaccagcc

SEQ ID NO: 52692 - DNA, 20 bp, synthetic construct
  misc_feature 1..20: note = chemically synthesized
  source 1..20: mol_type = other DNA
caggaatttgagaccagcct

SEQ ID NO: 52693 - DNA, 20 bp, synthetic construct
  misc_feature 1..20: note = chemically synthesized
  source 1..20: mol_type = other DNA
tgagaccagcctgggccgca

SEQ ID NO: 52694 - DNA, 20 bp, synthetic construct
  misc_feature 1..20: note = chemically synthesized
  source 1..20: mol_type = other DNA
accagcctgggccgcatagt

SEQ ID NO: 52695 - DNA, 20 bp, synthetic construct
  misc_feature 1..20: note = chemically synthesized
  source 1..20: mol_type = other DNA
aataaataaataataaataa

SEQ ID NO: 52696 - DNA, 20 bp, synthetic construct
  misc_feature 1..20: note = chemically synthesized
  source 1..20: mol_type = other DNA
taataaataatagtgatatg

SEQ ID NO: 52697 - DNA, 20 bp, synthetic construct
  misc_feature 1..20: note = chemically synthesized
  source 1..20: mol_type = other DNA
tgatatgaagcatgattaaa

SEQ ID NO: 52698 - DNA, 20 bp, synthetic construct
  misc_feature 1..20: note = chemically synthesized
  source 1..20: mol_type = other DNA
ccctattttttaaaatgcat

SEQ ID NO: 52699 - DNA, 20 bp, synthetic construct
  misc_feature 1..20: note = chemically synthesized
  source 1..20: mol_type = other DNA
tcgttacctgattcattccc

SEQ ID NO: 52700 - DNA, 20 bp, synthetic construct
  misc_feature 1..20: note = chemically synthesized
  source 1..20: mol_type = other DNA
tcattccctggttcctttca

SEQ ID NO: 52701 - DNA, 20 bp, synthetic construct
  misc_feature 1..20: note = chemically synthesized
  source 1..20: mol_type = other DNA
ttcacagtcctccgtgaccc

SEQ ID NO: 52702 - DNA, 20 bp, synthetic construct
  misc_feature 1..20: note = chemically synthesized
  source 1..20: mol_type = other DNA
gtcctccgtgacccaagtgt

SEQ ID NO: 52703 - DNA, 20 bp, synthetic construct
  misc_feature 1..20: note = chemically synthesized
  source 1..20: mol_type = other DNA
tcctccgtgacccaagtgtt

SEQ ID NO: 52704 - DNA, 20 bp, synthetic construct
  misc_feature 1..20: note = chemically synthesized
  source 1..20: mol_type = other DNA
cctccgtgacccaagtgtta

SEQ ID NO: 52705 - DNA, 20 bp, synthetic construct
  misc_feature 1..20: note = chemically synthesized
  source 1..20: mol_type = other DNA
tgacccaagtgttagggttt

SEQ ID NO: 52706 - DNA, 20 bp, synthetic construct
  misc_feature 1..20: note = chemically synthesized
  source 1..20: mol_type = other DNA
tttggtctctctactatttg

SEQ ID NO: 52707 - DNA, 20 bp, synthetic construct
  misc_feature 1..20: note = chemically synthesized
  source 1..20: mol_type = other DNA
ttggtctctctactatttgt

SEQ ID NO: 52708 - DNA, 20 bp, synthetic construct
  misc_feature 1..20: note = chemically synthesized
  source 1..20: mol_type = other DNA
actatttgtaggctgatata

SEQ ID NO: 52709 - DNA, 20 bp, synthetic construct
  misc_feature 1..20: note = chemically synthesized
  source 1..20: mol_type = other DNA
cacacacatatacacacaca

SEQ ID NO: 52710 - DNA, 20 bp, synthetic construct
  misc_feature 1..20: note = chemically synthesized
  source 1..20: mol_type = other DNA
acacacacacagtgtatctt

SEQ ID NO: 52711 - DNA, 20 bp, synthetic construct
  misc_feature 1..20: note = chemically synthesized
  source 1..20: mol_type = other DNA
atatctacacacatatgtat

SEQ ID NO: 52712 - DNA, 20 bp, synthetic construct
  misc_feature 1..20: note = chemically synthesized
  source 1..20: mol_type = other DNA
ctacacacatatgtataaga

SEQ ID NO: 52713 - DNA, 20 bp, synthetic construct
  misc_feature 1..20: note = chemically synthesized
  source 1..20: mol_type = other DNA
acatatgtataagaaagctc

SEQ ID NO: 52714 - DNA, 20 bp, synthetic construct
  misc_feature 1..20: note = chemically synthesized
  source 1..20: mol_type = other DNA
gtataagaaagctcaagata

SEQ ID NO: 52715 - DNA, 20 bp, synthetic construct
  misc_feature 1..20: note = chemically synthesized
  source 1..20: mol_type = other DNA
taagaaagctcaagatatag

SEQ ID NO: 52716 - DNA, 20 bp, synthetic construct
  misc_feature 1..20: note = chemically synthesized
  source 1..20: mol_type = other DNA
cctttttcaaaaataactga

SEQ ID NO: 52717 - DNA, 20 bp, synthetic construct
  misc_feature 1..20: note = chemically synthesized
  source 1..20: mol_type = other DNA
ctgaaagtttcaaactcttt

SEQ ID NO: 52718 - DNA, 20 bp, synthetic construct
  misc_feature 1..20: note = chemically synthesized
  source 1..20: mol_type = other DNA
tttcaaactctttaagtctc

SEQ ID NO: 52719 - DNA, 20 bp, synthetic construct
  misc_feature 1..20: note = chemically synthesized
  source 1..20: mol_type = other DNA
gtctccagttaccattttgc

SEQ ID NO: 52720 - DNA, 20 bp, synthetic construct
  misc_feature 1..20: note = chemically synthesized
  source 1..20: mol_type = other DNA
attttgctggtattcttatt

SEQ ID NO: 52721 - DNA, 20 bp, synthetic construct
  misc_feature 1..20: note = chemically synthesized
  source 1..20: mol_type = other DNA
acattcatcatattgttgca

SEQ ID NO: 52722 - DNA, 20 bp, synthetic construct
  misc_feature 1..20: note = chemically synthesized
  source 1..20: mol_type = other DNA
tcatcatattgttgcacagt

SEQ ID NO: 52723 - DNA, 20 bp, synthetic construct
  misc_feature 1..20: note = chemically synthesized
  source 1..20: mol_type = other DNA
attattttgcttaaacgtat

SEQ ID NO: 52724 - DNA, 20 bp, synthetic construct
  misc_feature 1..20: note = chemically synthesized
  source 1..20: mol_type = other DNA
aacgtatgagttaaaacact

SEQ ID NO: 52725 - DNA, 20 bp, synthetic construct
  misc_feature 1..20: note = chemically synthesized
  source 1..20: mol_type = other DNA
tatgagttaaaacacttggc

SEQ ID NO: 52726 - DNA, 20 bp, synthetic construct
  misc_feature 1..20: note = chemically synthesized
  source 1..20: mol_type = other DNA
atgagttaaaacacttggcc

SEQ ID NO: 52727 - DNA, 20 bp, synthetic construct
  misc_feature 1..20: note = chemically synthesized
  source 1..20: mol_type = other DNA
ttaaaacacttggccaggca

SEQ ID NO: 52728 - DNA, 20 bp, synthetic construct
  misc_feature 1..20: note = chemically synthesized
  source 1..20: mol_type = other DNA
aaacacttggccaggcatgg

SEQ ID NO: 52729 - DNA, 20 bp, synthetic construct
  misc_feature 1..20: note = chemically synthesized
  source 1..20: mol_type = other DNA
gtggttcacacctgtaatcc

SEQ ID NO: 52730 - DNA, 20 bp, synthetic construct
  misc_feature 1..20: note = chemically synthesized
  source 1..20: mol_type = other DNA
ggttcacacctgtaatccca

SEQ ID NO: 52731 - DNA, 20 bp, synthetic construct
  misc_feature 1..20: note = chemically synthesized
  source 1..20: mol_type = other DNA
cacctgtaatcccagagctt

SEQ ID NO: 52732 - DNA, 20 bp, synthetic construct
  misc_feature 1..20: note = chemically synthesized
  source 1..20: mol_type = other DNA
acctgtaatcccagagcttt

SEQ ID NO: 52733 - DNA, 20 bp, synthetic construct
  misc_feature 1..20: note = chemically synthesized
  source 1..20: mol_type = other DNA
tgtaatcccagagctttggg

SEQ ID NO: 52734 - DNA, 20 bp, synthetic construct
  misc_feature 1..20: note = chemically synthesized
  source 1..20: mol_type = other DNA
tcccagagctttgggaagcc

SEQ ID NO: 52735 - DNA, 20 bp, synthetic construct
  misc_feature 1..20: note = chemically synthesized
  source 1..20: mol_type = other DNA
gagctttgggaagccaagac

SEQ ID NO: 52736 - DNA, 20 bp, synthetic construct
  misc_feature 1..20: note = chemically synthesized
  source 1..20: mol_type = other DNA
ctttgggaagccaagactgg

SEQ ID NO: 52737 - DNA, 20 bp, synthetic construct
  misc_feature 1..20: note = chemically synthesized
  source 1..20: mol_type = other DNA
ccaagactggcagatctctt

SEQ ID NO: 52738 - DNA, 20 bp, synthetic construct
  misc_feature 1..20: note = chemically synthesized
  source 1..20: mol_type = other DNA
actggcagatctcttgagct

SEQ ID NO: 52739 - DNA, 20 bp, synthetic construct
  misc_feature 1..20: note = chemically synthesized
  source 1..20: mol_type = other DNA
ctggcagatctcttgagctc

SEQ ID NO: 52740 - DNA, 20 bp, synthetic construct
  misc_feature 1..20: note = chemically synthesized
  source 1..20: mol_type = other DNA
tctcttgagctcaggaattc

SEQ ID NO: 52741 - DNA, 20 bp, synthetic construct
  misc_feature 1..20: note = chemically synthesized
  source 1..20: mol_type = other DNA
tgagctcaggaattcaagac

SEQ ID NO: 52742 - DNA, 20 bp, synthetic construct
  misc_feature 1..20: note = chemically synthesized
  source 1..20: mol_type = other DNA
tcaggaattcaagaccagcc

SEQ ID NO: 52743 - DNA, 20 bp, synthetic construct
  misc_feature 1..20: note = chemically synthesized
  source 1..20: mol_type = other DNA
caggaattcaagaccagcct

SEQ ID NO: 52744 - DNA, 20 bp, synthetic construct
  misc_feature 1..20: note = chemically synthesized
  source 1..20: mol_type = other DNA
caagaccagcctgggcaaca

SEQ ID NO: 52745 - DNA, 20 bp, synthetic construct
  misc_feature 1..20: note = chemically synthesized
  source 1..20: mol_type = other DNA
gaaaaaccccatctctacaa

SEQ ID NO: 52746 - DNA, 20 bp, synthetic construct
  misc_feature 1..20: note = chemically synthesized
  source 1..20: mol_type = other DNA
aaccccatctctacaaaaga

SEQ ID NO: 52747 - DNA, 20 bp, synthetic construct
  misc_feature 1..20: note = chemically synthesized
  source 1..20: mol_type = other DNA
tctacaaaagatagaaaaat

SEQ ID NO: 52748 - DNA, 20 bp, synthetic construct
  misc_feature 1..20: note = chemically synthesized
  source 1..20: mol_type = other DNA
caaaagatagaaaaattagc

SEQ ID NO: 52749 - DNA, 20 bp, synthetic construct
  misc_feature 1..20: note = chemically synthesized
  source 1..20: mol_type = other DNA
aaaagatagaaaaattagcc

SEQ ID NO: 52750 - DNA, 20 bp, synthetic construct
  misc_feature 1..20: note = chemically synthesized
  source 1..20: mol_type = other DNA
atagaaaaattagccaggca

SEQ ID NO: 52751 - DNA, 20 bp, synthetic construct
  misc_feature 1..20: note = chemically synthesized
  source 1..20: mol_type = other DNA
gaaaaattagccaggcatgg

SEQ ID NO: 52752 - DNA, 20 bp, synthetic construct
  misc_feature 1..20: note = chemically synthesized
  source 1..20: mol_type = other DNA
ggcatggtggcgtgtgcctg

SEQ ID NO: 52753 - DNA, 20 bp, synthetic construct
  misc_feature 1..20: note = chemically synthesized
  source 1..20: mol_type = other DNA
gtggcgtgtgcctgtggtcc

SEQ ID NO: 52754 - DNA, 20 bp, synthetic construct
  misc_feature 1..20: note = chemically synthesized
  source 1..20: mol_type = other DNA
tgcctgtggtcccagctact

SEQ ID NO: 52755 - DNA, 20 bp, synthetic construct
  misc_feature 1..20: note = chemically synthesized
  source 1..20: mol_type = other DNA
gcctgtggtcccagctactc

SEQ ID NO: 52756 - DNA, 20 bp, synthetic construct
  misc_feature 1..20: note = chemically synthesized
  source 1..20: mol_type = other DNA
ctgtggtcccagctactcag

SEQ ID NO: 52757 - DNA, 20 bp, synthetic construct
  misc_feature 1..20: note = chemically synthesized
  source 1..20: mol_type = other DNA
tgtggtcccagctactcagg

SEQ ID NO: 52758 - DNA, 20 bp, synthetic construct
  misc_feature 1..20: note = chemically synthesized
  source 1..20: mol_type = other DNA
tcccagctactcaggaggct

SEQ ID NO: 52759 - DNA, 20 bp, synthetic construct
  misc_feature 1..20: note = chemically synthesized
  source 1..20: mol_type = other DNA
cccagctactcaggaggctg

SEQ ID NO: 52760 - DNA, 20 bp, synthetic construct
  misc_feature 1..20: note = chemically synthesized
  source 1..20: mol_type = other DNA
agctactcaggaggctgagg

SEQ ID NO: 52761 - DNA, 20 bp, synthetic construct
  misc_feature 1..20: note = chemically synthesized
  source 1..20: mol_type = other DNA
gctactcaggaggctgaggt

SEQ ID NO: 52762 - DNA, 20 bp, synthetic construct
  misc_feature 1..20: note = chemically synthesized
  source 1..20: mol_type = other DNA
tactcaggaggctgaggtgg

SEQ ID NO: 52763 - DNA, 20 bp, synthetic construct
  misc_feature 1..20: note = chemically synthesized
  source 1..20: mol_type = other DNA
actcaggaggctgaggtggg

SEQ ID NO: 52764 - DNA, 20 bp, synthetic construct
  misc_feature 1..20: note = chemically synthesized
  source 1..20: mol_type = other DNA
ctgaggtgggaggatcacat

SEQ ID NO: 52765 - DNA, 20 bp, synthetic construct
  misc_feature 1..20: note = chemically synthesized
  source 1..20: mol_type = other DNA
gtgggaggatcacattagcc

SEQ ID NO: 52766 - DNA, 20 bp, synthetic construct
  misc_feature 1..20: note = chemically synthesized
  source 1..20: mol_type = other DNA
tgggaggatcacattagccc

SEQ ID NO: 52767 - DNA, 20 bp, synthetic construct
  misc_feature 1..20: note = chemically synthesized
  source 1..20: mol_type = other DNA
ggaggatcacattagcccag

SEQ ID NO: 52768 - DNA, 20 bp, synthetic construct
  misc_feature 1..20: note = chemically synthesized
  source 1..20: mol_type = other DNA
gaggatcacattagcccagg

SEQ ID NO: 52769 - DNA, 20 bp, synthetic construct
  misc_feature 1..20: note = chemically synthesized
  source 1..20: mol_type = other DNA
tcacattagcccaggaggtt

SEQ ID NO: 52770 - DNA, 20 bp, synthetic construct
  misc_feature 1..20: note = chemically synthesized
  source 1..20: mol_type = other DNA
cacattagcccaggaggttg

SEQ ID NO: 52771 - DNA, 20 bp, synthetic construct
  misc_feature 1..20: note = chemically synthesized
  source 1..20: mol_type = other DNA
agcccaggaggttgaggctg

SEQ ID NO: 52772 - DNA, 20 bp, synthetic construct
  misc_feature 1..20: note = chemically synthesized
  source 1..20: mol_type = other DNA
caggaggttgaggctgcagt

SEQ ID NO: 52773 - DNA, 20 bp, synthetic construct
  misc_feature 1..20: note = chemically synthesized
  source 1..20: mol_type = other DNA
gtgattatgccactgcactc

SEQ ID NO: 52774 - DNA, 20 bp, synthetic construct
  misc_feature 1..20: note = chemically synthesized
  source 1..20: mol_type = other DNA
tatgccactgcactccagcc

SEQ ID NO: 52775 - DNA, 20 bp, synthetic construct
  misc_feature 1..20: note = chemically synthesized
  source 1..20: mol_type = other DNA
atgccactgcactccagcct

SEQ ID NO: 52776 - DNA, 20 bp, synthetic construct
  misc_feature 1..20: note = chemically synthesized
  source 1..20: mol_type = other DNA
gccactgcactccagcctgg

SEQ ID NO: 52777 - DNA, 20 bp, synthetic construct
  misc_feature 1..20: note = chemically synthesized
  source 1..20: mol_type = other DNA
ctgcactccagcctgggaga

SEQ ID NO: 52778 - DNA, 20 bp, synthetic construct
  misc_feature 1..20: note = chemically synthesized
  source 1..20: mol_type = other DNA
gcactccagcctgggagaca

SEQ ID NO: 52779 - DNA, 20 bp, synthetic construct
  misc_feature 1..20: note = chemically synthesized
  source 1..20: mol_type = other DNA
tccagcctgggagacagagt

SEQ ID NO: 52780 - DNA, 20 bp, synthetic construct
  misc_feature 1..20: note = chemically synthesized
  source 1..20: mol_type = other DNA
tgagaccctgtttcaaaaaa

SEQ ID NO: 52781 - DNA, 20 bp, synthetic construct
  misc_feature 1..20: note = chemically synthesized
  source 1..20: mol_type = other DNA
agaccctgtttcaaaaaaaa

SEQ ID NO: 52782 - DNA, 20 bp, synthetic construct
  misc_feature 1..20: note = chemically synthesized
  source 1..20: mol_type = other DNA
accctgtttcaaaaaaaaga

SEQ ID NO: 52783 - DNA, 20 bp, synthetic construct
  misc_feature 1..20: note = chemically synthesized
  source 1..20: mol_type = other DNA
cctgtttcaaaaaaaagaga

SEQ ID NO: 52784 - DNA, 20 bp, synthetic construct
  misc_feature 1..20: note = chemically synthesized
  source 1..20: mol_type = other DNA
aagagagagaaaatttaaaa

SEQ ID NO: 52785 - DNA, 20 bp, synthetic construct
  misc_feature 1..20: note = chemically synthesized
  source 1..20: mol_type = other DNA
ttaaaaaagaaaacaacacc

SEQ ID NO: 52786 - DNA, 20 bp, synthetic construct
  misc_feature 1..20: note = chemically synthesized
  source 1..20: mol_type = other DNA
taaaaaagaaaacaacacca

SEQ ID NO: 52787 - DNA, 20 bp, synthetic construct
  misc_feature 1..20: note = chemically synthesized
  source 1..20: mol_type = other DNA
aaaaaagaaaacaacaccaa

SEQ ID NO: 52788 - DNA, 20 bp, synthetic construct
  misc_feature 1..20: note = chemically synthesized
  source 1..20: mol_type = other DNA
acaccaagggctgtaacttt

SEQ ID NO: 52789 - DNA, 20 bp, synthetic construct
  misc_feature 1..20: note = chemically synthesized
  source 1..20: mol_type = other DNA
caccaagggctgtaacttta

SEQ ID NO: 52790 - DNA, 20 bp, synthetic construct
  misc_feature 1..20: note = chemically synthesized
  source 1..20: mol_type = other DNA
attcaaaaacgattactttc

SEQ ID NO: 52791 - DNA, 20 bp, synthetic construct
  misc_feature 1..20: note = chemically synthesized
  source 1..20: mol_type = other DNA
aacgattactttctggccct

SEQ ID NO: 52792 - DNA, 20 bp, synthetic construct
  misc_feature 1..20: note = chemically synthesized
  source 1..20: mol_type = other DNA
cgattactttctggccctaa

SEQ ID NO: 52793 - DNA, 20 bp, synthetic construct
  misc_feature 1..20: note = chemically synthesized
  source 1..20: mol_type = other DNA
tttctggccctaagagacat

SEQ ID NO: 52794 - DNA, 20 bp, synthetic construct
  misc_feature 1..20: note = chemically synthesized
  source 1..20: mol_type = other DNA
ttctggccctaagagacatg

SEQ ID NO: 52795 - DNA, 20 bp, synthetic construct
  misc_feature 1..20: note = chemically synthesized
  source 1..20: mol_type = other DNA
aagagacatgaggccaatac

SEQ ID NO: 52796 - DNA, 20 bp, synthetic construct
  misc_feature 1..20: note = chemically synthesized
  source 1..20: mol_type = other DNA
agagacatgaggccaatacc

SEQ ID NO: 52797 - DNA, 20 bp, synthetic construct
  misc_feature 1..20: note = chemically synthesized
  source 1..20: mol_type = other DNA
gacatgaggccaataccagg

SEQ ID NO: 52798 - DNA, 20 bp, synthetic construct
  misc_feature 1..20: note = chemically synthesized
  source 1..20: mol_type = other DNA
acatgaggccaataccagga

SEQ ID NO: 52799 - DNA, 20 bp, synthetic construct
  misc_feature 1..20: note = chemically synthesized
  source 1..20: mol_type = other DNA
catgaggccaataccaggaa

SEQ ID NO: 52800 - DNA, 20 bp, synthetic construct
  misc_feature 1..20: note = chemically synthesized
  source 1..20: mol_type = other DNA
atgaggccaataccaggaag

SEQ ID NO: 52801 - DNA, 20 bp, synthetic construct
  misc_feature 1..20: note = chemically synthesized
  source 1..20: mol_type = other DNA
tgaggccaataccaggaagg

SEQ ID NO: 52802 - DNA, 20 bp, synthetic construct
  misc_feature 1..20: note = chemically synthesized
  source 1..20: mol_type = other DNA
agggggttgatctcccaaac

SEQ ID NO: 52803 - DNA, 20 bp, synthetic construct
  misc_feature 1..20: note = chemically synthesized
  source 1..20: mol_type = other DNA
ggggttgatctcccaaacca

SEQ ID NO: 52804 - DNA, 20 bp, synthetic construct
  misc_feature 1..20: note = chemically synthesized
  source 1..20: mol_type = other DNA
gggttgatctcccaaaccag

SEQ ID NO: 52805 - DNA, 20 bp, synthetic construct
  misc_feature 1..20: note = chemically synthesized
  source 1..20: mol_type = other DNA
ttgatctcccaaaccagagg

SEQ ID NO: 52806 - DNA, 20 bp, synthetic construct
  misc_feature 1..20: note = chemically synthesized
  source 1..20: mol_type = other DNA
cccaaaccagaggcagaccc

SEQ ID NO: 52807 - DNA, 20 bp, synthetic construct
  misc_feature 1..20: note = chemically synthesized
  source 1..20: mol_type = other DNA
gcagaccctagactctaata

SEQ ID NO: 52808 - DNA, 20 bp, synthetic construct
  misc_feature 1..20: note = chemically synthesized
  source 1..20: mol_type = other DNA
ccctagactctaatacagtt

SEQ ID NO: 52809 - DNA, 20 bp, synthetic construct
  misc_feature 1..20: note = chemically synthesized
  source 1..20: mol_type = other DNA
cctagactctaatacagtta

SEQ ID NO: 52810 - DNA, 20 bp, synthetic construct
  misc_feature 1..20: note = chemically synthesized
  source 1..20: mol_type = other DNA
gactctaatacagttaagga

SEQ ID NO: 52811 - DNA, 20 bp, synthetic construct
  misc_feature 1..20: note = chemically synthesized
  source 1..20: mol_type = other DNA
taatacagttaaggaaagac

SEQ ID NO: 52812 - DNA, 20 bp, synthetic construct
  misc_feature 1..20: note = chemically synthesized
  source 1..20: mol_type = other DNA
acagttaaggaaagaccagc

SEQ ID NO: 52813 - DNA, 20 bp, synthetic construct
  misc_feature 1..20: note = chemically synthesized
  source 1..20: mol_type = other DNA
aggaaagaccagcaagatga

SEQ ID NO: 52814 - DNA, 20 bp, synthetic construct
  misc_feature 1..20: note = chemically synthesized
  source 1..20: mol_type = other DNA
gatgatagtccccaatacaa

SEQ ID NO: 52815 - DNA, 20 bp, synthetic construct
  misc_feature 1..20: note = chemically synthesized
  source 1..20: mol_type = other DNA
gatagtccccaatacaatag

SEQ ID NO: 52816 - DNA, 20 bp, synthetic construct
  misc_feature 1..20: note = chemically synthesized
  source 1..20: mol_type = other DNA
tgttttgttttgttttgttt

SEQ ID NO: 52817 - DNA, 20 bp, synthetic construct
  misc_feature 1..20: note = chemically synthesized
  source 1..20: mol_type = other DNA
ttttgttttgttttgtttta

SEQ ID NO: 52818 - DNA, 20 bp, synthetic construct
  misc_feature 1..20: note = chemically synthesized
  source 1..20: mol_type = other DNA
ttttgttttgttttagagac

SEQ ID NO: 52819 - DNA, 20 bp, synthetic construct
  misc_feature 1..20: note = chemically synthesized
  source 1..20: mol_type = other DNA
tttgttttgttttagagact

SEQ ID NO: 52820 - DNA, 20 bp, synthetic construct
  misc_feature 1..20: note = chemically synthesized
  source 1..20: mol_type = other DNA
ttgttttgttttagagactg

SEQ ID NO: 52821 - DNA, 20 bp, synthetic construct
  misc_feature 1..20: note = chemically synthesized
  source 1..20: mol_type = other DNA
tggggtcttgctcgattgcc

SEQ ID NO: 52822 - DNA, 20 bp, synthetic construct
  misc_feature 1..20: note = chemically synthesized
  source 1..20: mol_type = other DNA
ggggtcttgctcgattgccc

SEQ ID NO: 52823 - DNA, 20 bp, synthetic construct
  misc_feature 1..20: note = chemically synthesized
  source 1..20: mol_type = other DNA
ttgctcgattgcccaggctg

SEQ ID NO: 52824 - DNA, 20 bp, synthetic construct
  misc_feature 1..20: note = chemically synthesized
  source 1..20: mol_type = other DNA
cgattgcccaggctgtagtg

SEQ ID NO: 52825 - DNA, 20 bp, synthetic construct
  misc_feature 1..20: note = chemically synthesized
  source 1..20: mol_type = other DNA
ttgcccaggctgtagtgcag

SEQ ID NO: 52826 - DNA, 20 bp, synthetic construct
  misc_feature 1..20: note = chemically synthesized
  source 1..20: mol_type = other DNA
cccaggctgtagtgcagcgg

SEQ ID NO: 52827 - DNA, 20 bp, synthetic construct
  misc_feature 1..20: note = chemically synthesized
  source 1..20: mol_type = other DNA
ccaggctgtagtgcagcggt

SEQ ID NO: 52828 - DNA, 20 bp, synthetic construct
  misc_feature 1..20: note = chemically synthesized
  source 1..20: mol_type = other DNA
gtagtgcagcggtgggacaa

SEQ ID NO: 52829 - DNA, 20 bp, synthetic construct
  misc_feature 1..20: note = chemically synthesized
  source 1..20: mol_type = other DNA
ggtgggacaatagctcactg

SEQ ID NO: 52830 - DNA, 20 bp, synthetic construct
  misc_feature 1..20: note = chemically synthesized
  source 1..20: mol_type = other DNA
tcactgcagactccaactcc

SEQ ID NO: 52831 - DNA, 20 bp, synthetic construct
  misc_feature 1..20: note = chemically synthesized
  source 1..20: mol_type = other DNA
cactgcagactccaactcct

SEQ ID NO: 52832 - DNA, 20 bp, synthetic construct
  misc_feature 1..20: note = chemically synthesized
  source 1..20: mol_type = other DNA
agactccaactcctgggctc

SEQ ID NO: 52833 - DNA, 20 bp, synthetic construct
  misc_feature 1..20: note = chemically synthesized
  source 1..20: mol_type = other DNA
ctcaagcaatcctcctgcct

SEQ ID NO: 52834 - DNA, 20 bp, synthetic construct
  misc_feature 1..20: note = chemically synthesized
  source 1..20: mol_type = other DNA
tcctgcctcagcctcctgaa

SEQ ID NO: 52835 - DNA, 20 bp, synthetic construct
  misc_feature 1..20: note = chemically synthesized
  source 1..20: mol_type = other DNA
gcctcagcctcctgaatagc

SEQ ID NO: 52836 - DNA, 20 bp, synthetic construct
  misc_feature 1..20: note = chemically synthesized
  source 1..20: mol_type = other DNA
cctcagcctcctgaatagct

SEQ ID NO: 52837 - DNA, 20 bp, synthetic construct
  misc_feature 1..20: note = chemically synthesized
  source 1..20: mol_type = other DNA
tcctgaatagctgggactac

SEQ ID NO: 52838 - DNA, 20 bp, synthetic construct
  misc_feature 1..20: note = chemically synthesized
  source 1..20: mol_type = other DNA
cctgaatagctgggactaca

SEQ ID NO: 52839 - DNA, 20 bp, synthetic construct
  misc_feature 1..20: note = chemically synthesized
  source 1..20: mol_type = other DNA
ctgaatagctgggactacaa

SEQ ID NO: 52840 - DNA, 20 bp, synthetic construct
  misc_feature 1..20: note = chemically synthesized
  source 1..20: mol_type = other DNA
caattttttaaatttttgtg

SEQ ID NO: 52841 - DNA, 20 bp, synthetic construct
  misc_feature 1..20: note = chemically synthesized
  source 1..20: mol_type = other DNA
ttaaatttttgtgtagaaac

SEQ ID NO: 52842 - DNA, 20 bp, synthetic construct
  misc_feature 1..20: note = chemically synthesized
  source 1..20: mol_type = other DNA
taaatttttgtgtagaaacg

SEQ ID NO: 52843 - DNA, 20 bp, synthetic construct
  misc_feature 1..20: note = chemically synthesized
  source 1..20: mol_type = other DNA
aaatttttgtgtagaaacga

SEQ ID NO: 52844 - DNA, 20 bp, synthetic construct
  misc_feature 1..20: note = chemically synthesized
  source 1..20: mol_type = other DNA
gagggtcttgctttgttgcc

SEQ ID NO: 52845 - DNA, 20 bp, synthetic construct
  misc_feature 1..20: note = chemically synthesized
  source 1..20: mol_type = other DNA
agggtcttgctttgttgccc

SEQ ID NO: 52846 - DNA, 20 bp, synthetic construct
  misc_feature 1..20: note = chemically synthesized
  source 1..20: mol_type = other DNA
tcttgctttgttgcccaggc

SEQ ID NO: 52847 - DNA, 20 bp, synthetic construct
  misc_feature 1..20: note = chemically synthesized
  source 1..20: mol_type = other DNA
ccaggctggtctccaactcc

SEQ ID NO: 52848 - DNA, 20 bp, synthetic construct
  misc_feature 1..20: note = chemically synthesized
  source 1..20: mol_type = other DNA
ggtctccaactcctggcttc

SEQ ID NO: 52849 - DNA, 20 bp, synthetic construct
  misc_feature 1..20: note = chemically synthesized
  source 1..20: mol_type = other DNA
gtctccaactcctggcttca

SEQ ID NO: 52850 - DNA, 20 bp, synthetic construct
  misc_feature 1..20: note = chemically synthesized
  source 1..20: mol_type = other DNA
tctccaactcctggcttcaa

SEQ ID NO: 52851 - DNA, 20 bp, synthetic construct
  misc_feature 1..20: note = chemically synthesized
  source 1..20: mol_type = other DNA
ttcaagggatcctcccacct

SEQ ID NO: 52852 - DNA, 20 bp, synthetic construct
  misc_feature 1..20: note = chemically synthesized
  source 1..20: mol_type = other DNA
acctcagcctcccaaattgc

SEQ ID NO: 52853 - DNA, 20 bp, synthetic construct
  misc_feature 1..20: note = chemically synthesized
  source 1..20: mol_type = other DNA
cctcagcctcccaaattgct

SEQ ID NO: 52854 - DNA, 20 bp, synthetic construct
  misc_feature 1..20: note = chemically synthesized
  source 1..20: mol_type = other DNA
ctcccaaattgctgggatta

SEQ ID NO: 52855 - DNA, 20 bp, synthetic construct
  misc_feature 1..20: note = chemically synthesized
  source 1..20: mol_type = other DNA
tcccaaattgctgggattac

SEQ ID NO: 52856 - DNA, 20 bp, synthetic construct
  misc_feature 1..20: note = chemically synthesized
  source 1..20: mol_type = other DNA
attgctgggattacaggtgt

SEQ ID NO: 52857 - DNA, 20 bp, synthetic construct
  misc_feature 1..20: note = chemically synthesized
  source 1..20: mol_type = other DNA
caggtgtgagccaccacaac

SEQ ID NO: 52858 - DNA, 20 bp, synthetic construct
  misc_feature 1..20: note = chemically synthesized
  source 1..20: mol_type = other DNA
tgtgagccaccacaaccagc

SEQ ID NO: 52859 - DNA, 20 bp, synthetic construct
  misc_feature 1..20: note = chemically synthesized
  source 1..20: mol_type = other DNA
actttactaattttaaaatt

SEQ ID NO: 52860 - DNA, 20 bp, synthetic construct
  misc_feature 1..20: note = chemically synthesized
  source 1..20: mol_type = other DNA
ttaagaacttaaaacttgaa

SEQ ID NO: 52861 - DNA, 20 bp, synthetic construct
  misc_feature 1..20: note = chemically synthesized
  source 1..20: mol_type = other DNA
gaacttaaaacttgaatagc

SEQ ID NO: 52862 - DNA, 20 bp, synthetic construct
  misc_feature 1..20: note = chemically synthesized
  source 1..20: mol_type = other DNA
acttaaaacttgaatagcta

SEQ ID NO: 52863 - DNA, 20 bp, synthetic construct
  misc_feature 1..20: note = chemically synthesized
  source 1..20: mol_type = other DNA
acttgaatagctagagcacc

SEQ ID NO: 52864 - DNA, 20 bp, synthetic construct
  misc_feature 1..20: note = chemically synthesized
  source 1..20: mol_type = other DNA
atttttctttgtccccaaat

SEQ ID NO: 52865 - DNA, 20 bp, synthetic construct
  misc_feature 1..20: note = chemically synthesized
  source 1..20: mol_type = other DNA
tctttgtccccaaataagtg

SEQ ID NO: 52866 - DNA, 20 bp, synthetic construct
  misc_feature 1..20: note = chemically synthesized
  source 1..20: mol_type = other DNA
tccccaaataagtgcagttg

SEQ ID NO: 52867 - DNA, 20 bp, synthetic construct
  misc_feature 1..20: note = chemically synthesized
  source 1..20: mol_type = other DNA
ccccaaataagtgcagttgc

SEQ ID NO: 52868 - DNA, 20 bp, synthetic construct
  misc_feature 1..20: note = chemically synthesized
  source 1..20: mol_type = other DNA
aataagtgcagttgcaggca

SEQ ID NO: 52869 - DNA, 20 bp, synthetic construct
  misc_feature 1..20: note = chemically synthesized
  source 1..20: mol_type = other DNA
agaaaatctgacatctttgc

SEQ ID NO: 52870 - DNA, 20 bp, synthetic construct
  misc_feature 1..20: note = chemically synthesized
  source 1..20: mol_type = other DNA
catctttgcaagaatcatcg

SEQ ID NO: 52871 - DNA, 20 bp, synthetic construct
  misc_feature 1..20: note = chemically synthesized
  source 1..20: mol_type = other DNA
tgcaagaatcatcgtggatg

SEQ ID NO: 52872 - DNA, 20 bp, synthetic construct
  misc_feature 1..20: note = chemically synthesized
  source 1..20: mol_type = other DNA
tagactctgtcctgtgtctc

SEQ ID NO: 52873 - DNA, 20 bp, synthetic construct
  misc_feature 1..20: note = chemically synthesized
  source 1..20: mol_type = other DNA
tctgtcctgtgtctctggcc

SEQ ID NO: 52874 - DNA, 20 bp, synthetic construct
  misc_feature 1..20: note = chemically synthesized
  source 1..20: mol_type = other DNA
ctgtgtctctggcctggttt

SEQ ID NO: 52875 - DNA, 20 bp, synthetic construct
  misc_feature 1..20: note = chemically synthesized
  source 1..20: mol_type = other DNA
tgtgtctctggcctggtttc

SEQ ID NO: 52876 - DNA, 20 bp, synthetic construct
  misc_feature 1..20: note = chemically synthesized
  source 1..20: mol_type = other DNA
gtgtctctggcctggtttcg

SEQ ID NO: 52877 - DNA, 20 bp, synthetic construct
  misc_feature 1..20: note = chemically synthesized
  source 1..20: mol_type = other DNA
tctggcctggtttcggggac

SEQ ID NO: 52878 - DNA, 20 bp, synthetic construct
  misc_feature 1..20: note = chemically synthesized
  source 1..20: mol_type = other DNA
ctggcctggtttcggggacc

SEQ ID NO: 52879 - DNA, 20 bp, synthetic construct
  misc_feature 1..20: note = chemically synthesized
  source 1..20: mol_type = other DNA
ggcctggtttcggggaccag

SEQ ID NO: 52880 - DNA, 20 bp, synthetic construct
  misc_feature 1..20: note = chemically synthesized
  source 1..20: mol_type = other DNA
gcctggtttcggggaccagg

SEQ ID NO: 52881 - DNA, 20 bp, synthetic construct
  misc_feature 1..20: note = chemically synthesized
  source 1..20: mol_type = other DNA
cctggtttcggggaccagga

SEQ ID NO: 52882 - DNA, 20 bp, synthetic construct
  misc_feature 1..20: note = chemically synthesized
  source 1..20: mol_type = other DNA
ggtttcggggaccaggaggg

SEQ ID NO: 52883 - DNA, 20 bp, synthetic construct
  misc_feature 1..20: note = chemically synthesized
  source 1..20: mol_type = other DNA
gggcagacccttgcactgcc

SEQ ID NO: 52884 - DNA, 20 bp, synthetic construct
  misc_feature 1..20: note = chemically synthesized
  source 1..20: mol_type = other DNA
cagacccttgcactgccaag

SEQ ID NO: 52885 - DNA, 20 bp, synthetic construct
  misc_feature 1..20: note = chemically synthesized
  source 1..20: mol_type = other DNA
cactgccaagaagcatgcca

SEQ ID NO: 52886 - DNA, 20 bp, synthetic construct
  misc_feature 1..20: note = chemically synthesized
  source 1..20: mol_type = other DNA
agcatgccaaagttaatcat

SEQ ID NO: 52887 - DNA, 20 bp, synthetic construct
  misc_feature 1..20: note = chemically synthesized
  source 1..20: mol_type = other DNA
agttaatcattggccctgct

SEQ ID NO: 52888 - DNA, 20 bp, synthetic construct
  misc_feature 1..20: note = chemically synthesized
  source 1..20: mol_type = other DNA
cattggccctgctgagtaca

SEQ ID NO: 52889 - DNA, 20 bp, synthetic construct
  misc_feature 1..20: note = chemically synthesized
  source 1..20: mol_type = other DNA
ctgctgagtacatggccgat

SEQ ID NO: 52890 - DNA, 20 bp, synthetic construct
  misc_feature 1..20: note = chemically synthesized
  source 1..20: mol_type = other DNA
tgctgagtacatggccgatc

SEQ ID NO: 52891 - DNA, 20 bp, synthetic construct
  misc_feature 1..20: note = chemically synthesized
  source 1..20: mol_type = other DNA
acatgtttgcatcaacctac

SEQ ID NO: 52892 - DNA, 20 bp, synthetic construct
  misc_feature 1..20: note = chemically synthesized
  source 1..20: mol_type = other DNA
cacctttgatcaatacattt

SEQ ID NO: 52893 - DNA, 20 bp, synthetic construct
  misc_feature 1..20: note = chemically synthesized
  source 1..20: mol_type = other DNA
caatacattttagacaaacg

SEQ ID NO: 52894 - DNA, 20 bp, synthetic construct
  misc_feature 1..20: note = chemically synthesized
  source 1..20: mol_type = other DNA
tttagacaaacgtggttttt

SEQ ID NO: 52895 - DNA, 20 bp, synthetic construct
  misc_feature 1..20: note = chemically synthesized
  source 1..20: mol_type = other DNA
aaacgtggtttttgagtcca

SEQ ID NO: 52896 - DNA, 20 bp, synthetic construct
  misc_feature 1..20: note = chemically synthesized
  source 1..20: mol_type = other DNA
tggtttttgagtccaaagat

SEQ ID NO: 52897 - DNA, 20 bp, synthetic construct
  misc_feature 1..20: note = chemically synthesized
  source 1..20: mol_type = other DNA
ggtttttgagtccaaagatc

SEQ ID NO: 52898 - DNA, 20 bp, synthetic construct
  misc_feature 1..20: note = chemically synthesized
  source 1..20: mol_type = other DNA
gtttttgagtccaaagatca

SEQ ID NO: 52899 - DNA, 20 bp, synthetic construct
  misc_feature 1..20: note = chemically synthesized
  source 1..20: mol_type = other DNA
ttgagtccaaagatcagggc

SEQ ID NO: 52900 - DNA, 20 bp, synthetic construct
  misc_feature 1..20: note = chemically synthesized
  source 1..20: mol_type = other DNA
tgagtccaaagatcagggct

SEQ ID NO: 52901 - DNA, 20 bp, synthetic construct
  misc_feature 1..20: note = chemically synthesized
  source 1..20: mol_type = other DNA
ggctgggttgacctgaatac

SEQ ID NO: 52902 - DNA, 20 bp, synthetic construct
  misc_feature 1..20: note = chemically synthesized
  source 1..20: mol_type = other DNA
gttgacctgaatactggata

SEQ ID NO: 52903 - DNA, 20 bp, synthetic construct
  misc_feature 1..20: note = chemically synthesized
  source 1..20: mol_type = other DNA
ttgacctgaatactggatac

SEQ ID NO: 52904 - DNA, 20 bp, synthetic construct
  misc_feature 1..20: note = chemically synthesized
  source 1..20: mol_type = other DNA
tgacctgaatactggataca

SEQ ID NO: 52905 - DNA, 20 bp, synthetic construct
  misc_feature 1..20: note = chemically synthesized
  source 1..20: mol_type = other DNA
tggatacagggcatataaaa

SEQ ID NO: 52906 - DNA, 20 bp, synthetic construct
  misc_feature 1..20: note = chemically synthesized
  source 1..20: mol_type = other DNA
ggatacagggcatataaaac

SEQ ID NO: 52907 - DNA, 20 bp, synthetic construct
  misc_feature 1..20: note = chemically synthesized
  source 1..20: mol_type = other DNA
gatacagggcatataaaaca

SEQ ID NO: 52908 - DNA, 20 bp, synthetic construct
  misc_feature 1..20: note = chemically synthesized
  source 1..20: mol_type = other DNA
atacagggcatataaaacag

SEQ ID NO: 52909 - DNA, 20 bp, synthetic construct
  misc_feature 1..20: note = chemically synthesized
  source 1..20: mol_type = other DNA
agggcatataaaacaggggc

SEQ ID NO: 52910 - DNA, 20 bp, synthetic construct
  misc_feature 1..20: note = chemically synthesized
  source 1..20: mol_type = other DNA
gggcatataaaacaggggca

SEQ ID NO: 52911 - DNA, 20 bp, synthetic construct
  misc_feature 1..20: note = chemically synthesized
  source 1..20: mol_type = other DNA
tataaaacaggggcaaggca

SEQ ID NO: 52912 - DNA, 20 bp, synthetic construct
  misc_feature 1..20: note = chemically synthesized
  source 1..20: mol_type = other DNA
aggggcaaggcacagactca

SEQ ID NO: 52913 - DNA, 20 bp, synthetic construct
  misc_feature 1..20: note = chemically synthesized
  source 1..20: mol_type = other DNA
ggcaaggcacagactcatag

SEQ ID NO: 52914 - DNA, 20 bp, synthetic construct
  misc_feature 1..20: note = chemically synthesized
  source 1..20: mol_type = other DNA
caaggcacagactcatagca

SEQ ID NO: 52915 - DNA, 20 bp, synthetic construct
  misc_feature 1..20: note = chemically synthesized
  source 1..20: mol_type = other DNA
atagcagagcaatcaccacc

SEQ ID NO: 52916 - DNA, 20 bp, synthetic construct
  misc_feature 1..20: note = chemically synthesized
  source 1..20: mol_type = other DNA
agagcaatcaccaccaagcc

SEQ ID NO: 52917 - DNA, 20 bp, synthetic construct
  misc_feature 1..20: note = chemically synthesized
  source 1..20: mol_type = other DNA
accaagcctggaataactgc

SEQ ID NO: 52918 - DNA, 20 bp, synthetic construct
  misc_feature 1..20: note = chemically synthesized
  source 1..20: mol_type = other DNA
ccaagcctggaataactgca

SEQ ID NO: 52919 - DNA, 20 bp, synthetic construct
  misc_feature 1..20: note = chemically synthesized
  source 1..20: mol_type = other DNA
caagcctggaataactgcaa

SEQ ID NO: 52920 - DNA, 20 bp, synthetic construct
  misc_feature 1..20: note = chemically synthesized
  source 1..20: mol_type = other DNA
ggctctgctgacatcttcct

SEQ ID NO: 52921 - DNA, 20 bp, synthetic construct
  misc_feature 1..20: note = chemically synthesized
  source 1..20: mol_type = other DNA
gctctgctgacatcttcctg

SEQ ID NO: 52922 - DNA, 20 bp, synthetic construct
  misc_feature 1..20: note = chemically synthesized
  source 1..20: mol_type = other DNA
tgacatcttcctgaggtgcc

SEQ ID NO: 52923 - DNA, 20 bp, synthetic construct
  misc_feature 1..20: note = chemically synthesized
  source 1..20: mol_type = other DNA
gacatcttcctgaggtgcca

SEQ ID NO: 52924 - DNA, 20 bp, synthetic construct
  misc_feature 1..20: note = chemically synthesized
  source 1..20: mol_type = other DNA
tcctgaggtgccaaggaaat

SEQ ID NO: 52925 - DNA, 20 bp, synthetic construct
  misc_feature 1..20: note = chemically synthesized
  source 1..20: mol_type = other DNA
cctgaggtgccaaggaaatg

SEQ ID NO: 52926 - DNA, 20 bp, synthetic construct
  misc_feature 1..20: note = chemically synthesized
  source 1..20: mol_type = other DNA
aggtgccaaggaaatgagga

SEQ ID NO: 52927 - DNA, 20 bp, synthetic construct
  misc_feature 1..20: note = chemically synthesized
  source 1..20: mol_type = other DNA
gtgccaaggaaatgaggatg

SEQ ID NO: 52928 - DNA, 20 bp, synthetic construct
  misc_feature 1..20: note = chemically synthesized
  source 1..20: mol_type = other DNA
tgccaaggaaatgaggatgg

SEQ ID NO: 52929 - DNA, 20 bp, synthetic construct
  misc_feature 1..20: note = chemically synthesized
  source 1..20: mol_type = other DNA
caaggaaatgaggatggagg

SEQ ID NO: 52930 - DNA, 20 bp, synthetic construct
  misc_feature 1..20: note = chemically synthesized
  source 1..20: mol_type = other DNA
aaggaaatgaggatggagga

SEQ ID NO: 52931 - DNA, 20 bp, synthetic construct
  misc_feature 1..20: note = chemically synthesized
  source 1..20: mol_type = other DNA
atgaatgttctccatgactt

SEQ ID NO: 52932 - DNA, 20 bp, synthetic construct
  misc_feature 1..20: note = chemically synthesized
  source 1..20: mol_type = other DNA
tgaatgttctccatgacttt

SEQ ID NO: 52933 - DNA, 20 bp, synthetic construct
  misc_feature 1..20: note = chemically synthesized
  source 1..20: mol_type = other DNA
ttctccatgactttgggatc

SEQ ID NO: 52934 - DNA, 20 bp, synthetic construct
  misc_feature 1..20: note = chemically synthesized
  source 1..20: mol_type = other DNA
tccagtcaacacattacctc

SEQ ID NO: 52935 - DNA, 20 bp, synthetic construct
  misc_feature 1..20: note = chemically synthesized
  source 1..20: mol_type = other DNA
ccagtcaacacattacctcc

SEQ ID NO: 52936 - DNA, 20 bp, synthetic construct
  misc_feature 1..20: note = chemically synthesized
  source 1..20: mol_type = other DNA
ttacctccaggtgaattacc

SEQ ID NO: 52937 - DNA, 20 bp, synthetic construct
  misc_feature 1..20: note = chemically synthesized
  source 1..20: mol_type = other DNA
aggtgaattaccaagactcc

SEQ ID NO: 52938 - DNA, 20 bp, synthetic construct
  misc_feature 1..20: note = chemically synthesized
  source 1..20: mol_type = other DNA
ggtgaattaccaagactccc

SEQ ID NO: 52939 - DNA, 20 bp, synthetic construct
  misc_feature 1..20: note = chemically synthesized
  source 1..20: mol_type = other DNA
attaccaagactcccaggac

SEQ ID NO: 52940 - DNA, 20 bp, synthetic construct
  misc_feature 1..20: note = chemically synthesized
  source 1..20: mol_type = other DNA
ctcccaggactggttcatct

SEQ ID NO: 52941 - DNA, 20 bp, synthetic construct
  misc_feature 1..20: note = chemically synthesized
  source 1..20: mol_type = other DNA
catcttggtgtccgtgatcg

SEQ ID NO: 52942 - DNA, 20 bp, synthetic construct
  misc_feature 1..20: note = chemically synthesized
  source 1..20: mol_type = other DNA
gtgtccgtgatcgcagacct

SEQ ID NO: 52943 - DNA, 20 bp, synthetic construct
  misc_feature 1..20: note = chemically synthesized
  source 1..20: mol_type = other DNA
tgtccgtgatcgcagacctc

SEQ ID NO: 52944 - DNA, 20 bp, synthetic construct
  misc_feature 1..20: note = chemically synthesized
  source 1..20: mol_type = other DNA
tctacgtcctcttccccatc

SEQ ID NO: 52945 - DNA, 20 bp, synthetic construct
  misc_feature 1..20: note = chemically synthesized
  source 1..20: mol_type = other DNA
tccccatctggttccatctt

SEQ ID NO: 52946 - DNA, 20 bp, synthetic construct
  misc_feature 1..20: note = chemically synthesized
  source 1..20: mol_type = other DNA
ccccatctggttccatcttc

SEQ ID NO: 52947 - DNA, 20 bp, synthetic construct
  misc_feature 1..20: note = chemically synthesized
  source 1..20: mol_type = other DNA
catctggttccatcttcagg

SEQ ID NO: 52948 - DNA, 20 bp, synthetic construct
  misc_feature 1..20: note = chemically synthesized
  source 1..20: mol_type = other DNA
gttccatcttcaggaagctg

SEQ ID NO: 52949 - DNA, 20 bp, synthetic construct
  misc_feature 1..20: note = chemically synthesized
  source 1..20: mol_type = other DNA
ttccatcttcaggaagctgt

SEQ ID NO: 52950 - DNA, 20 bp, synthetic construct
  misc_feature 1..20: note = chemically synthesized
  source 1..20: mol_type = other DNA
ctgtgggcattaaactcctt

SEQ ID NO: 52951 - DNA, 20 bp, synthetic construct
  misc_feature 1..20: note = chemically synthesized
  source 1..20: mol_type = other DNA
tgtgggcattaaactccttt

SEQ ID NO: 52952 - DNA, 20 bp, synthetic construct
  misc_feature 1..20: note = chemically synthesized
  source 1..20: mol_type = other DNA
gggcattaaactcctttggg

SEQ ID NO: 52953 - DNA, 20 bp, synthetic construct
  misc_feature 1..20: note = chemically synthesized
  source 1..20: mol_type = other DNA
ctcctttgggtagctgtgat

SEQ ID NO: 52954 - DNA, 20 bp, synthetic construct
  misc_feature 1..20: note = chemically synthesized
  source 1..20: mol_type = other DNA
cctttgggtagctgtgattg

SEQ ID NO: 52955 - DNA, 20 bp, synthetic construct
  misc_feature 1..20: note = chemically synthesized
  source 1..20: mol_type = other DNA
gggtagctgtgattggagac

SEQ ID NO: 52956 - DNA, 20 bp, synthetic construct
  misc_feature 1..20: note = chemically synthesized
  source 1..20: mol_type = other DNA
actggctcaacctcgtcttt

SEQ ID NO: 52957 - DNA, 20 bp, synthetic construct
  misc_feature 1..20: note = chemically synthesized
  source 1..20: mol_type = other DNA
ggctcaacctcgtctttaag

SEQ ID NO: 52958 - DNA, 20 bp, synthetic construct
  misc_feature 1..20: note = chemically synthesized
  source 1..20: mol_type = other DNA
caacctcgtctttaagtggt

SEQ ID NO: 52959 - DNA, 20 bp, synthetic construct
  misc_feature 1..20: note = chemically synthesized
  source 1..20: mol_type = other DNA
tttaagtggtaagaaccata

SEQ ID NO: 52960 - DNA, 20 bp, synthetic construct
  misc_feature 1..20: note = chemically synthesized
  source 1..20: mol_type = other DNA
taagtggtaagaaccatata

SEQ ID NO: 52961 - DNA, 20 bp, synthetic construct
  misc_feature 1..20: note = chemically synthesized
  source 1..20: mol_type = other DNA
agtggtaagaaccatataga

SEQ ID NO: 52962 - DNA, 20 bp, synthetic construct
  misc_feature 1..20: note = chemically synthesized
  source 1..20: mol_type = other DNA
gtggtaagaaccatatagag

SEQ ID NO: 52963 - DNA, 20 bp, synthetic construct
  misc_feature 1..20: note = chemically synthesized
  source 1..20: mol_type = other DNA
ggtaagaaccatatagagag

SEQ ID NO: 52964 - DNA, 20 bp, synthetic construct
  misc_feature 1..20: note = chemically synthesized
  source 1..20: mol_type = other DNA
gaaccatatagagaggagat

SEQ ID NO: 52965 - DNA, 20 bp, synthetic construct
  misc_feature 1..20: note = chemically synthesized
  source 1..20: mol_type = other DNA
catatagagaggagatcagc

SEQ ID NO: 52966 - DNA, 20 bp, synthetic construct
  misc_feature 1..20: note = chemically synthesized
  source 1..20: mol_type = other DNA
agagaggagatcagcaagaa

SEQ ID NO: 52967 - DNA, 20 bp, synthetic construct
  misc_feature 1..20: note = chemically synthesized
  source 1..20: mol_type = other DNA
agaggagatcagcaagaaaa

SEQ ID NO: 52968 - DNA, 20 bp, synthetic construct
  misc_feature 1..20: note = chemically synthesized
  source 1..20: mol_type = other DNA
gaggagatcagcaagaaaag

SEQ ID NO: 52969 - DNA, 20 bp, synthetic construct
  misc_feature 1..20: note = chemically synthesized
  source 1..20: mol_type = other DNA
agatcagcaagaaaagaggc

SEQ ID NO: 52970 - DNA, 20 bp, synthetic construct
  misc_feature 1..20: note = chemically synthesized
  source 1..20: mol_type = other DNA
ctctcgcaatgtctgtccat

SEQ ID NO: 52971 - DNA, 20 bp, synthetic construct
  misc_feature 1..20: note = chemically synthesized
  source 1..20: mol_type = other DNA
tcgcaatgtctgtccatcag

SEQ ID NO: 52972 - DNA, 20 bp, synthetic construct
  misc_feature 1..20: note = chemically synthesized
  source 1..20: mol_type = other DNA
ccatcagaagttgctttccc

SEQ ID NO: 52973 - DNA, 20 bp, synthetic construct
  misc_feature 1..20: note = chemically synthesized
  source 1..20: mol_type = other DNA
catcagaagttgctttcccc

SEQ ID NO: 52974 - DNA, 20 bp, synthetic construct
  misc_feature 1..20: note = chemically synthesized
  source 1..20: mol_type = other DNA
gttgctttccccaggctatt

SEQ ID NO: 52975 - DNA, 20 bp, synthetic construct
  misc_feature 1..20: note = chemically synthesized
  source 1..20: mol_type = other DNA
ttgctttccccaggctattc

SEQ ID NO: 52976 - DNA, 20 bp, synthetic construct
  misc_feature 1..20: note = chemically synthesized
  source 1..20: mol_type = other DNA
ctttccccaggctattcagg

SEQ ID NO: 52977 - DNA, 20 bp, synthetic construct
  misc_feature 1..20: note = chemically synthesized
  source 1..20: mol_type = other DNA
ccaggctattcaggaagcca

SEQ ID NO: 52978 - DNA, 20 bp, synthetic construct
  misc_feature 1..20: note = chemically synthesized
  source 1..20: mol_type = other DNA
caggctattcaggaagccac

SEQ ID NO: 52979 - DNA, 20 bp, synthetic construct
  misc_feature 1..20: note = chemically synthesized
  source 1..20: mol_type = other DNA
ccaacccctctctctgactt

SEQ ID NO: 52980 - DNA, 20 bp, synthetic construct
  misc_feature 1..20: note = chemically synthesized
  source 1..20: mol_type = other DNA
gactttggatcatctacata

SEQ ID NO: 52981 - DNA, 20 bp, synthetic construct
  misc_feature 1..20: note = chemically synthesized
  source 1..20: mol_type = other DNA
actttggatcatctacataa

SEQ ID NO: 52982 - DNA, 20 bp, synthetic construct
  misc_feature 1..20: note = chemically synthesized
  source 1..20: mol_type = other DNA
ctttggatcatctacataaa

SEQ ID NO: 52983 - DNA, 20 bp, synthetic construct
  misc_feature 1..20: note = chemically synthesized
  source 1..20: mol_type = other DNA
tttggatcatctacataaag

SEQ ID NO: 52984 - DNA, 20 bp, synthetic construct
  misc_feature 1..20: note = chemically synthesized
  source 1..20: mol_type = other DNA
ttggatcatctacataaagg

SEQ ID NO: 52985 - DNA, 20 bp, synthetic construct
  misc_feature 1..20: note = chemically synthesized
  source 1..20: mol_type = other DNA
gatcatctacataaaggggg

SEQ ID NO: 52986 - DNA, 20 bp, synthetic construct
  misc_feature 1..20: note = chemically synthesized
  source 1..20: mol_type = other DNA
atctacataaagggggaaga

SEQ ID NO: 52987 - DNA, 20 bp, synthetic construct
  misc_feature 1..20: note = chemically synthesized
  source 1..20: mol_type = other DNA
gaagacagaaaaaatcctac

SEQ ID NO: 52988 - DNA, 20 bp, synthetic construct
  misc_feature 1..20: note = chemically synthesized
  source 1..20: mol_type = other DNA
acagaaaaaatcctaccagt

SEQ ID NO: 52989 - DNA, 20 bp, synthetic construct
  misc_feature 1..20: note = chemically synthesized
  source 1..20: mol_type = other DNA
ctaccagtgagttgaaaata

SEQ ID NO: 52990 - DNA, 20 bp, synthetic construct
  misc_feature 1..20: note = chemically synthesized
  source 1..20: mol_type = other DNA
taccagtgagttgaaaatac

SEQ ID NO: 52991 - DNA, 20 bp, synthetic construct
  misc_feature 1..20: note = chemically synthesized
  source 1..20: mol_type = other DNA
agtgagttgaaaatacagga

SEQ ID NO: 52992 - DNA, 20 bp, synthetic construct
  misc_feature 1..20: note = chemically synthesized
  source 1..20: mol_type = other DNA
acaggaaagcctatttcata

SEQ ID NO: 52993 - DNA, 20 bp, synthetic construct
  misc_feature 1..20: note = chemically synthesized
  source 1..20: mol_type = other DNA
caggaaagcctatttcatat

SEQ ID NO: 52994 - DNA, 20 bp, synthetic construct
  misc_feature 1..20: note = chemically synthesized
  source 1..20: mol_type = other DNA
agcctatttcatatgggtta

SEQ ID NO: 52995 - DNA, 20 bp, synthetic construct
  misc_feature 1..20: note = chemically synthesized
  source 1..20: mol_type = other DNA
gcctatttcatatgggttaa

SEQ ID NO: 52996 - DNA, 20 bp, synthetic construct
  misc_feature 1..20: note = chemically synthesized
  source 1..20: mol_type = other DNA
cctatttcatatgggttaaa

SEQ ID NO: 52997 - DNA, 20 bp, synthetic construct
  misc_feature 1..20: note = chemically synthesized
  source 1..20: mol_type = other DNA
atttcatatgggttaaaggg

SEQ ID NO: 52998 - DNA, 20 bp, synthetic construct
  misc_feature 1..20: note = chemically synthesized
  source 1..20: mol_type = other DNA
tttcatatgggttaaagggt

SEQ ID NO: 52999 - DNA, 20 bp, synthetic construct
  misc_feature 1..20: note = chemically synthesized
  source 1..20: mol_type = other DNA
atatgggttaaagggtagga

SEQ ID NO: 53000 - DNA, 20 bp, synthetic construct
  misc_feature 1..20: note = chemically synthesized
  source 1..20: mol_type = other DNA
ggacagttgaatttcgtgaa

SEQ ID NO: 53001 - DNA, 20 bp, synthetic construct
  misc_feature 1..20: note = chemically synthesized
  source 1..20: mol_type = other DNA
ttgaatttcgtgaaaagtct

SEQ ID NO: 53002 - DNA, 20 bp, synthetic construct
  misc_feature 1..20: note = chemically synthesized
  source 1..20: mol_type = other DNA
cgtgaaaagtctgagttata

SEQ ID NO: 53003 - DNA, 20 bp, synthetic construct
  misc_feature 1..20: note = chemically synthesized
  source 1..20: mol_type = other DNA
gtgaaaagtctgagttatat

SEQ ID NO: 53004 - DNA, 20 bp, synthetic construct
  misc_feature 1..20: note = chemically synthesized
  source 1..20: mol_type = other DNA
gtctgagttatataggcttt

SEQ ID NO: 53005 - DNA, 20 bp, synthetic construct
  misc_feature 1..20: note = chemically synthesized
  source 1..20: mol_type = other DNA
agttatataggctttgagca

SEQ ID NO: 53006 - DNA, 20 bp, synthetic construct
  misc_feature 1..20: note = chemically synthesized
  source 1..20: mol_type = other DNA
ttatataggctttgagcaaa

SEQ ID NO: 53007 - DNA, 20 bp, synthetic construct
  misc_feature 1..20: note = chemically synthesized
  source 1..20: mol_type = other DNA
ctttgagcaaagagttttat

SEQ ID NO: 53008 - DNA, 20 bp, synthetic construct
  misc_feature 1..20: note = chemically synthesized
  source 1..20: mol_type = other DNA
caaagagttttattagtatg

SEQ ID NO: 53009 - DNA, 20 bp, synthetic construct
  misc_feature 1..20: note = chemically synthesized
  source 1..20: mol_type = other DNA
agagttttattagtatgaag

SEQ ID NO: 53010 - DNA, 20 bp, synthetic construct
  misc_feature 1..20: note = chemically synthesized
  source 1..20: mol_type = other DNA
gttttattagtatgaagcag

SEQ ID NO: 53011 - DNA, 20 bp, synthetic construct
  misc_feature 1..20: note = chemically synthesized
  source 1..20: mol_type = other DNA
tttattagtatgaagcagaa

SEQ ID NO: 53012 - DNA, 20 bp, synthetic construct
  misc_feature 1..20: note = chemically synthesized
  source 1..20: mol_type = other DNA
ttattagtatgaagcagaag

SEQ ID NO: 53013 - DNA, 20 bp, synthetic construct
  misc_feature 1..20: note = chemically synthesized
  source 1..20: mol_type = other DNA
gaagcagaagaggtaacata

SEQ ID NO: 53014 - DNA, 20 bp, synthetic construct
  misc_feature 1..20: note = chemically synthesized
  source 1..20: mol_type = other DNA
cagaagaggtaacataaaga

SEQ ID NO: 53015 - DNA, 20 bp, synthetic construct
  misc_feature 1..20: note = chemically synthesized
  source 1..20: mol_type = other DNA
gtaacataaagaaagatgta

SEQ ID NO: 53016 - DNA, 20 bp, synthetic construct
  misc_feature 1..20: note = chemically synthesized
  source 1..20: mol_type = other DNA
taacataaagaaagatgtat

SEQ ID NO: 53017 - DNA, 20 bp, synthetic construct
  misc_feature 1..20: note = chemically synthesized
  source 1..20: mol_type = other DNA
aacataaagaaagatgtatg

SEQ ID NO: 53018 - DNA, 20 bp, synthetic construct
  misc_feature 1..20: note = chemically synthesized
  source 1..20: mol_type = other DNA
taaagaaagatgtatggggc

SEQ ID NO: 53019 - DNA, 20 bp, synthetic construct
  misc_feature 1..20: note = chemically synthesized
  source 1..20: mol_type = other DNA
aaagaaagatgtatggggcc

SEQ ID NO: 53020 - DNA, 20 bp, synthetic construct
  misc_feature 1..20: note = chemically synthesized
  source 1..20: mol_type = other DNA
aagatgtatggggccaggca

SEQ ID NO: 53021 - DNA, 20 bp, synthetic construct
  misc_feature 1..20: note = chemically synthesized
  source 1..20: mol_type = other DNA
atgtatggggccaggcatgg

SEQ ID NO: 53022 - DNA, 20 bp, synthetic construct
  misc_feature 1..20: note = chemically synthesized
  source 1..20: mol_type = other DNA
gtggctcacacctgtaatcc

SEQ ID NO: 53023 - DNA, 20 bp, synthetic construct
  misc_feature 1..20: note = chemically synthesized
  source 1..20: mol_type = other DNA
cacctgtaatcccagcactt

SEQ ID NO: 53024 - DNA, 20 bp, synthetic construct
  misc_feature 1..20: note = chemically synthesized
  source 1..20: mol_type = other DNA
acctgtaatcccagcacttt

SEQ ID NO: 53025 - DNA, 20 bp, synthetic construct
  misc_feature 1..20: note = chemically synthesized
  source 1..20: mol_type = other DNA
ctgtaatcccagcactttgg

SEQ ID NO: 53026 - DNA, 20 bp, synthetic construct
  misc_feature 1..20: note = chemically synthesized
  source 1..20: mol_type = other DNA
tgtaatcccagcactttggg

SEQ ID NO: 53027 - DNA, 20 bp, synthetic construct
  misc_feature 1..20: note = chemically synthesized
  source 1..20: mol_type = other DNA
tcccagcactttgggaggcc

SEQ ID NO: 53028 - DNA, 20 bp, synthetic construct
  misc_feature 1..20: note = chemically synthesized
  source 1..20: mol_type = other DNA
cccagcactttgggaggccg

SEQ ID NO: 53029 - DNA, 20 bp, synthetic construct
  misc_feature 1..20: note = chemically synthesized
  source 1..20: mol_type = other DNA
agcactttgggaggccgagg

SEQ ID NO: 53030 - DNA, 20 bp, synthetic construct
  misc_feature 1..20: note = chemically synthesized
  source 1..20: mol_type = other DNA
gcactttgggaggccgaggt

SEQ ID NO: 53031 - DNA, 20 bp, synthetic construct
  misc_feature 1..20: note = chemically synthesized
  source 1..20: mol_type = other DNA
cgaggtgggcgaatcactcc

SEQ ID NO: 53032 - DNA, 20 bp, synthetic construct
  misc_feature 1..20: note = chemically synthesized
  source 1..20: mol_type = other DNA
gaggtgggcgaatcactcct

SEQ ID NO: 53033 - DNA, 20 bp, synthetic construct
  misc_feature 1..20: note = chemically synthesized
  source 1..20: mol_type = other DNA
gaatcactcctgggtgaact

SEQ ID NO: 53034 - DNA, 20 bp, synthetic construct
  misc_feature 1..20: note = chemically synthesized
  source 1..20: mol_type = other DNA
aatcactcctgggtgaactc

SEQ ID NO: 53035 - DNA, 20 bp, synthetic construct
  misc_feature 1..20: note = chemically synthesized
  source 1..20: mol_type = other DNA
tcactcctgggtgaactcag

SEQ ID NO: 53036 - DNA, 20 bp, synthetic construct
  misc_feature 1..20: note = chemically synthesized
  source 1..20: mol_type = other DNA
ctgggtgaactcaggagttc

SEQ ID NO: 53037 - DNA, 20 bp, synthetic construct
  misc_feature 1..20: note = chemically synthesized
  source 1..20: mol_type = other DNA
tgaactcaggagttcaagac

SEQ ID NO: 53038 - DNA, 20 bp, synthetic construct
  misc_feature 1..20: note = chemically synthesized
  source 1..20: mol_type = other DNA
tcaggagttcaagaccagcc

SEQ ID NO: 53039 - DNA, 20 bp, synthetic construct
  misc_feature 1..20: note = chemically synthesized
  source 1..20: mol_type = other DNA
caggagttcaagaccagcct

SEQ ID NO: 53040 - DNA, 20 bp, synthetic construct
  misc_feature 1..20: note = chemically synthesized
  source 1..20: mol_type = other DNA
caagaccagcctgggcaaca

SEQ ID NO: 53041 - DNA, 20 bp, synthetic construct
  misc_feature 1..20: note = chemically synthesized
  source 1..20: mol_type = other DNA
tacaaaaacattacgaaaat

SEQ ID NO: 53042 - DNA, 20 bp, synthetic construct
  misc_feature 1..20: note = chemically synthesized
  source 1..20: mol_type = other DNA
aaaacattacgaaaattagc

SEQ ID NO: 53043 - DNA, 20 bp, synthetic construct
  misc_feature 1..20: note = chemically synthesized
  source 1..20: mol_type = other DNA
aaacattacgaaaattagct

SEQ ID NO: 53044 - DNA, 20 bp, synthetic construct
  misc_feature 1..20: note = chemically synthesized
  source 1..20: mol_type = other DNA
cgaaaattagctgggcgtgt

SEQ ID NO: 53045 - DNA, 20 bp, synthetic construct
  misc_feature 1..20: note = chemically synthesized
  source 1..20: mol_type = other DNA
agctgggcgtgttggtgctg

SEQ ID NO: 53046 - DNA, 20 bp, synthetic construct
  misc_feature 1..20: note = chemically synthesized
  source 1..20: mol_type = other DNA
gcgtgttggtgctgtagtcc

SEQ ID NO: 53047 - DNA, 20 bp, synthetic construct
  misc_feature 1..20: note = chemically synthesized
  source 1..20: mol_type = other DNA
gtgctgtagtcccagctact

SEQ ID NO: 53048 - DNA, 20 bp, synthetic construct
  misc_feature 1..20: note = chemically synthesized
  source 1..20: mol_type = other DNA
tgctgtagtcccagctactc

SEQ ID NO: 53049 - DNA, 20 bp, synthetic construct
  misc_feature 1..20: note = chemically synthesized
  source 1..20: mol_type = other DNA
ctgtagtcccagctactcag

SEQ ID NO: 53050 - DNA, 20 bp, synthetic construct
  misc_feature 1..20: note = chemically synthesized
  source 1..20: mol_type = other DNA
tgtagtcccagctactcagg

SEQ ID NO: 53051 - DNA, 20 bp, synthetic construct
  misc_feature 1..20: note = chemically synthesized
  source 1..20: mol_type = other DNA
tcccagctactcaggaggct

SEQ ID NO: 53052 - DNA, 20 bp, synthetic construct
  misc_feature 1..20: note = chemically synthesized
  source 1..20: mol_type = other DNA
cccagctactcaggaggctg

SEQ ID NO: 53053 - DNA, 20 bp, synthetic construct
  misc_feature 1..20: note = chemically synthesized
  source 1..20: mol_type = other DNA
gctactcaggaggctgaggt

SEQ ID NO: 53054 - DNA, 20 bp, synthetic construct
  misc_feature 1..20: note = chemically synthesized
  source 1..20: mol_type = other DNA
tactcaggaggctgaggtga

SEQ ID NO: 53055 - DNA, 20 bp, synthetic construct
  misc_feature 1..20: note = chemically synthesized
  source 1..20: mol_type = other DNA
actcaggaggctgaggtgag

SEQ ID NO: 53056 - DNA, 20 bp, synthetic construct
  misc_feature 1..20: note = chemically synthesized
  source 1..20: mol_type = other DNA
caggaggctgaggtgagagg

SEQ ID NO: 53057 - DNA, 20 bp, synthetic construct
  misc_feature 1..20: note = chemically synthesized
  source 1..20: mol_type = other DNA
ggaggctgaggtgagaggcg

SEQ ID NO: 53058 - DNA, 20 bp, synthetic construct
  misc_feature 1..20: note = chemically synthesized
  source 1..20: mol_type = other DNA
gaggctgaggtgagaggcgg

SEQ ID NO: 53059 - DNA, 20 bp, synthetic construct
  misc_feature 1..20: note = chemically synthesized
  source 1..20: mol_type = other DNA
ggctgaggtgagaggcggag

SEQ ID NO: 53060 - DNA, 20 bp, synthetic construct
  misc_feature 1..20: note = chemically synthesized
  source 1..20: mol_type = other DNA
gctgaggtgagaggcggagg

SEQ ID NO: 53061 - DNA, 20 bp, synthetic construct
  misc_feature 1..20: note = chemically synthesized
  source 1..20: mol_type = other DNA
gtgagaggcggaggaggttg

SEQ ID NO: 53062 - DNA, 20 bp, synthetic construct
  misc_feature 1..20: note = chemically synthesized
  source 1..20: mol_type = other DNA
gaggcggaggaggttgcagt

SEQ ID NO: 53063 - DNA, 20 bp, synthetic construct
  misc_feature 1..20: note = chemically synthesized
  source 1..20: mol_type = other DNA
ggaggaggttgcagtgagtc

SEQ ID NO: 53064 - DNA, 20 bp, synthetic construct
  misc_feature 1..20: note = chemically synthesized
  source 1..20: mol_type = other DNA
aagatcatgccactgcactc

SEQ ID NO: 53065 - DNA, 20 bp, synthetic construct
  misc_feature 1..20: note = chemically synthesized
  source 1..20: mol_type = other DNA
catgccactgcactccagcc

SEQ ID NO: 53066 - DNA, 20 bp, synthetic construct
  misc_feature 1..20: note = chemically synthesized
  source 1..20: mol_type = other DNA
atgccactgcactccagcct

SEQ ID NO: 53067 - DNA, 20 bp, synthetic construct
  misc_feature 1..20: note = chemically synthesized
  source 1..20: mol_type = other DNA
ctgcactccagcctgggcaa

SEQ ID NO: 53068 - DNA, 20 bp, synthetic construct
  misc_feature 1..20: note = chemically synthesized
  source 1..20: mol_type = other DNA
gcactccagcctgggcaaca

SEQ ID NO: 53069 - DNA, 20 bp, synthetic construct
  misc_feature 1..20: note = chemically synthesized
  source 1..20: mol_type = other DNA
tccagcctgggcaacagagt

SEQ ID NO: 53070 - DNA, 20 bp, synthetic construct
  misc_feature 1..20: note = chemically synthesized
  source 1..20: mol_type = other DNA
cctgtctcaaaaaaaaaaaa

SEQ ID NO: 53071 - DNA, 20 bp, synthetic construct
  misc_feature 1..20: note = chemically synthesized
  source 1..20: mol_type = other DNA
tctcaaaaaaaaaaaaaaga

SEQ ID NO: 53072 - DNA, 20 bp, synthetic construct
  misc_feature 1..20: note = chemically synthesized
  source 1..20: mol_type = other DNA
tgatgtatgctgtatgaaaa

SEQ ID NO: 53073 - DNA, 20 bp, synthetic construct
  misc_feature 1..20: note = chemically synthesized
  source 1..20: mol_type = other DNA
gatgtatgctgtatgaaaaa

SEQ ID NO: 53074 - DNA, 20 bp, synthetic construct
  misc_feature 1..20: note = chemically synthesized
  source 1..20: mol_type = other DNA
gtatgaaaaaaggaaacaca

SEQ ID NO: 53075 - DNA, 20 bp, synthetic construct
  misc_feature 1..20: note = chemically synthesized
  source 1..20: mol_type = other DNA
gaaacacacagatgattcaa

SEQ ID NO: 53076 - DNA, 20 bp, synthetic construct
  misc_feature 1..20: note = chemically synthesized
  source 1..20: mol_type = other DNA
tgattcaacagcctgttttg

SEQ ID NO: 53077 - DNA, 20 bp, synthetic construct
  misc_feature 1..20: note = chemically synthesized
  source 1..20: mol_type = other DNA
gattcaacagcctgttttgt

SEQ ID NO: 53078 - DNA, 20 bp, synthetic construct
  misc_feature 1..20: note = chemically synthesized
  source 1..20: mol_type = other DNA
attcaacagcctgttttgtg

SEQ ID NO: 53079 - DNA, 20 bp, synthetic construct
  misc_feature 1..20: note = chemically synthesized
  source 1..20: mol_type = other DNA
ctgttttgtggggtaatgaa

SEQ ID NO: 53080 - DNA, 20 bp, synthetic construct
  misc_feature 1..20: note = chemically synthesized
  source 1..20: mol_type = other DNA
ggggtaatgaaaagtcaccc

SEQ ID NO: 53081 - DNA, 20 bp, synthetic construct
  misc_feature 1..20: note = chemically synthesized
  source 1..20: mol_type = other DNA
gggtaatgaaaagtcaccct

SEQ ID NO: 53082 - DNA, 20 bp, synthetic construct
  misc_feature 1..20: note = chemically synthesized
  source 1..20: mol_type = other DNA
tgaaaagtcaccctgggaac

SEQ ID NO: 53083 - DNA, 20 bp, synthetic construct
  misc_feature 1..20: note = chemically synthesized
  source 1..20: mol_type = other DNA
gaaaagtcaccctgggaact

SEQ ID NO: 53084 - DNA, 20 bp, synthetic construct
  misc_feature 1..20: note = chemically synthesized
  source 1..20: mol_type = other DNA
tcaccctgggaactgggctc

SEQ ID NO: 53085 - DNA, 20 bp, synthetic construct
  misc_feature 1..20: note = chemically synthesized
  source 1..20: mol_type = other DNA
acccaccaactacatgtcct

SEQ ID NO: 53086 - DNA, 20 bp, synthetic construct
  misc_feature 1..20: note = chemically synthesized
  source 1..20: mol_type = other DNA
accaactacatgtccttggc

SEQ ID NO: 53087 - DNA, 20 bp, synthetic construct
  misc_feature 1..20: note = chemically synthesized
  source 1..20: mol_type = other DNA
gcaagtcatatcaattatct

SEQ ID NO: 53088 - DNA, 20 bp, synthetic construct
  misc_feature 1..20: note = chemically synthesized
  source 1..20: mol_type = other DNA
tctgttttataatctacaaa

SEQ ID NO: 53089 - DNA, 20 bp, synthetic construct
  misc_feature 1..20: note = chemically synthesized
  source 1..20: mol_type = other DNA
ctgttttataatctacaaat

SEQ ID NO: 53090 - DNA, 20 bp, synthetic construct
  misc_feature 1..20: note = chemically synthesized
  source 1..20: mol_type = other DNA
atctacaaataggttatctc

SEQ ID NO: 53091 - DNA, 20 bp, synthetic construct
  misc_feature 1..20: note = chemically synthesized
  source 1..20: mol_type = other DNA
tacaaataggttatctctgg

SEQ ID NO: 53092 - DNA, 20 bp, synthetic construct
  misc_feature 1..20: note = chemically synthesized
  source 1..20: mol_type = other DNA
tctggcagcttaataataat

SEQ ID NO: 53093 - DNA, 20 bp, synthetic construct
  misc_feature 1..20: note = chemically synthesized
  source 1..20: mol_type = other DNA
ctggcagcttaataataatc

SEQ ID NO: 53094 - DNA, 20 bp, synthetic construct
  misc_feature 1..20: note = chemically synthesized
  source 1..20: mol_type = other DNA
tggcagcttaataataatca

SEQ ID NO: 53095 - DNA, 20 bp, synthetic construct
  misc_feature 1..20: note = chemically synthesized
  source 1..20: mol_type = other DNA
cagggttaacatttattaaa

SEQ ID NO: 53096 - DNA, 20 bp, synthetic construct
  misc_feature 1..20: note = chemically synthesized
  source 1..20: mol_type = other DNA
atttattaaacagtgtgtgc

SEQ ID NO: 53097 - DNA, 20 bp, synthetic construct
  misc_feature 1..20: note = chemically synthesized
  source 1..20: mol_type = other DNA
tgtgctatgtgcttttctgt

SEQ ID NO: 53098 - DNA, 20 bp, synthetic construct
  misc_feature 1..20: note = chemically synthesized
  source 1..20: mol_type = other DNA
gtgctatgtgcttttctgtg

SEQ ID NO: 53099 - DNA, 20 bp, synthetic construct
  misc_feature 1..20: note = chemically synthesized
  source 1..20: mol_type = other DNA
ctatgtgcttttctgtgagg

SEQ ID NO: 53100 - DNA, 20 bp, synthetic construct
  misc_feature 1..20: note = chemically synthesized
  source 1..20: mol_type = other DNA
gaggtagttactgctattta

SEQ ID NO: 53101 - DNA, 20 bp, synthetic construct
  misc_feature 1..20: note = chemically synthesized
  source 1..20: mol_type = other DNA
gttactgctatttacagaaa

SEQ ID NO: 53102 - DNA, 20 bp, synthetic construct
  misc_feature 1..20: note = chemically synthesized
  source 1..20: mol_type = other DNA
actgctatttacagaaacag

SEQ ID NO: 53103 - DNA, 20 bp, synthetic construct
  misc_feature 1..20: note = chemically synthesized
  source 1..20: mol_type = other DNA
atttacagaaacagtagatg

SEQ ID NO: 53104 - DNA, 20 bp, synthetic construct
  misc_feature 1..20: note = chemically synthesized
  source 1..20: mol_type = other DNA
ttacagaaacagtagatgca

SEQ ID NO: 53105 - DNA, 20 bp, synthetic construct
  misc_feature 1..20: note = chemically synthesized
  source 1..20: mol_type = other DNA
aaacagtagatgcagagacc

SEQ ID NO: 53106 - DNA, 20 bp, synthetic construct
  misc_feature 1..20: note = chemically synthesized
  source 1..20: mol_type = other DNA
aacagtagatgcagagacca

SEQ ID NO: 53107 - DNA, 20 bp, synthetic construct
  misc_feature 1..20: note = chemically synthesized
  source 1..20: mol_type = other DNA
gatgcagagaccaaggtgct

SEQ ID NO: 53108 - DNA, 20 bp, synthetic construct
  misc_feature 1..20: note = chemically synthesized
  source 1..20: mol_type = other DNA
aaggtgctgagttaaatgat

SEQ ID NO: 53109 - DNA, 20 bp, synthetic construct
  misc_feature 1..20: note = chemically synthesized
  source 1..20: mol_type = other DNA
aggtgctgagttaaatgatt

SEQ ID NO: 53110 - DNA, 20 bp, synthetic construct
  misc_feature 1..20: note = chemically synthesized
  source 1..20: mol_type = other DNA
agttaaatgattaggccaac

SEQ ID NO: 53111 - DNA, 20 bp, synthetic construct
  misc_feature 1..20: note = chemically synthesized
  source 1..20: mol_type = other DNA
gttaaatgattaggccaaca

SEQ ID NO: 53112 - DNA, 20 bp, synthetic construct
  misc_feature 1..20: note = chemically synthesized
  source 1..20: mol_type = other DNA
aatgattaggccaacaaggt

SEQ ID NO: 53113 - DNA, 20 bp, synthetic construct
  misc_feature 1..20: note = chemically synthesized
  source 1..20: mol_type = other DNA
caacaaggttagtacatgcc

SEQ ID NO: 53114 - DNA, 20 bp, synthetic construct
  misc_feature 1..20: note = chemically synthesized
  source 1..20: mol_type = other DNA
aaggttagtacatgccgagc

SEQ ID NO: 53115 - DNA, 20 bp, synthetic construct
  misc_feature 1..20: note = chemically synthesized
  source 1..20: mol_type = other DNA
aggttagtacatgccgagcc

SEQ ID NO: 53116 - DNA, 20 bp, synthetic construct
  misc_feature 1..20: note = chemically synthesized
  source 1..20: mol_type = other DNA
tagtacatgccgagccagga

SEQ ID NO: 53117 - DNA, 20 bp, synthetic construct
  misc_feature 1..20: note = chemically synthesized
  source 1..20: mol_type = other DNA
tacatgccgagccaggatgg

SEQ ID NO: 53118 - DNA, 20 bp, synthetic construct
  misc_feature 1..20: note = chemically synthesized
  source 1..20: mol_type = other DNA
gccgagccaggatggaagcc

SEQ ID NO: 53119 - DNA, 20 bp, synthetic construct
  misc_feature 1..20: note = chemically synthesized
  source 1..20: mol_type = other DNA
ccgagccaggatggaagccc

SEQ ID NO: 53120 - DNA, 20 bp, synthetic construct
  misc_feature 1..20: note = chemically synthesized
  source 1..20: mol_type = other DNA
agccaggatggaagcccagg

SEQ ID NO: 53121 - DNA, 20 bp, synthetic construct
  misc_feature 1..20: note = chemically synthesized
  source 1..20: mol_type = other DNA
gccaggatggaagcccaggt

SEQ ID NO: 53122 - DNA, 20 bp, synthetic construct
  misc_feature 1..20: note = chemically synthesized
  source 1..20: mol_type = other DNA
aggatggaagcccaggtagg

SEQ ID NO: 53123 - DNA, 20 bp, synthetic construct
  misc_feature 1..20: note = chemically synthesized
  source 1..20: mol_type = other DNA
ggatggaagcccaggtaggc

SEQ ID NO: 53124 - DNA, 20 bp, synthetic construct
  misc_feature 1..20: note = chemically synthesized
  source 1..20: mol_type = other DNA
ggaagcccaggtaggcaggc

SEQ ID NO: 53125 - DNA, 20 bp, synthetic construct
  misc_feature 1..20: note = chemically synthesized
  source 1..20: mol_type = other DNA
ggtaggcaggctggcttccg

SEQ ID NO: 53126 - DNA, 20 bp, synthetic construct
  misc_feature 1..20: note = chemically synthesized
  source 1..20: mol_type = other DNA
cttatgaactatgttacgtc

SEQ ID NO: 53127 - DNA, 20 bp, synthetic construct
  misc_feature 1..20: note = chemically synthesized
  source 1..20: mol_type = other DNA
gtgctgataaactgactctc

SEQ ID NO: 53128 - DNA, 20 bp, synthetic construct
  misc_feature 1..20: note = chemically synthesized
  source 1..20: mol_type = other DNA
tgctgataaactgactctct

SEQ ID NO: 53129 - DNA, 20 bp, synthetic construct
  misc_feature 1..20: note = chemically synthesized
  source 1..20: mol_type = other DNA
gctgataaactgactctctg

SEQ ID NO: 53130 - DNA, 20 bp, synthetic construct
  misc_feature 1..20: note = chemically synthesized
  source 1..20: mol_type = other DNA
tgataaactgactctctggg

SEQ ID NO: 53131 - DNA, 20 bp, synthetic construct
  misc_feature 1..20: note = chemically synthesized
  source 1..20: mol_type = other DNA
taaactgactctctggggag

SEQ ID NO: 53132 - DNA, 20 bp, synthetic construct
  misc_feature 1..20: note = chemically synthesized
  source 1..20: mol_type = other DNA
aaactgactctctggggagc

SEQ ID NO: 53133 - DNA, 20 bp, synthetic construct
  misc_feature 1..20: note = chemically synthesized
  source 1..20: mol_type = other DNA
aactgactctctggggagca

SEQ ID NO: 53134 - DNA, 20 bp, synthetic construct
  misc_feature 1..20: note = chemically synthesized
  source 1..20: mol_type = other DNA
actgactctctggggagcag

SEQ ID NO: 53135 - DNA, 20 bp, synthetic construct
  misc_feature 1..20: note = chemically synthesized
  source 1..20: mol_type = other DNA
actctctggggagcagggga

SEQ ID NO: 53136 - DNA, 20 bp, synthetic construct
  misc_feature 1..20: note = chemically synthesized
  source 1..20: mol_type = other DNA
ggggagcaggggaaagccct

SEQ ID NO: 53137 - DNA, 20 bp, synthetic construct
  misc_feature 1..20: note = chemically synthesized
  source 1..20: mol_type = other DNA
gcaggggaaagccctgagtt

SEQ ID NO: 53138 - DNA, 20 bp, synthetic construct
  misc_feature 1..20: note = chemically synthesized
  source 1..20: mol_type = other DNA
tcacgtaaacattcccattc

SEQ ID NO: 53139 - DNA, 20 bp, synthetic construct
  misc_feature 1..20: note = chemically synthesized
  source 1..20: mol_type = other DNA
tttcttttgtttgtttgttt

SEQ ID NO: 53140 - DNA, 20 bp, synthetic construct
  misc_feature 1..20: note = chemically synthesized
  source 1..20: mol_type = other DNA
ttttgtttgtttgtttgaga

SEQ ID NO: 53141 - DNA, 20 bp, synthetic construct
  misc_feature 1..20: note = chemically synthesized
  source 1..20: mol_type = other DNA
ttgtttgtttgtttgagatg

SEQ ID NO: 53142 - DNA, 20 bp, synthetic construct
  misc_feature 1..20: note = chemically synthesized
  source 1..20: mol_type = other DNA
tggagtctcgcactgttgcc

SEQ ID NO: 53143 - DNA, 20 bp, synthetic construct
  misc_feature 1..20: note = chemically synthesized
  source 1..20: mol_type = other DNA
gtctcgcactgttgcctggc

SEQ ID NO: 53144 - DNA, 20 bp, synthetic construct
  misc_feature 1..20: note = chemically synthesized
  source 1..20: mol_type = other DNA
ctcgcactgttgcctggctg

SEQ ID NO: 53145 - DNA, 20 bp, synthetic construct
  misc_feature 1..20: note = chemically synthesized
  source 1..20: mol_type = other DNA
gttgcctggctggagtgcaa

SEQ ID NO: 53146 - DNA, 20 bp, synthetic construct
  misc_feature 1..20: note = chemically synthesized
  source 1..20: mol_type = other DNA
ggagtgcaatggtgcaatct

SEQ ID NO: 53147 - DNA, 20 bp, synthetic construct
  misc_feature 1..20: note = chemically synthesized
  source 1..20: mol_type = other DNA
cactgcaacctctgcctctc

SEQ ID NO: 53148 - DNA, 20 bp, synthetic construct
  misc_feature 1..20: note = chemically synthesized
  source 1..20: mol_type = other DNA
aacctctgcctctccggttc

SEQ ID NO: 53149 - DNA, 20 bp, synthetic construct
  misc_feature 1..20: note = chemically synthesized
  source 1..20: mol_type = other DNA
ttcaagtgattctcctgcct

SEQ ID NO: 53150 - DNA, 20 bp, synthetic construct
  misc_feature 1..20: note = chemically synthesized
  source 1..20: mol_type = other DNA
ttctcctgcctcagcctccc

SEQ ID NO: 53151 - DNA, 20 bp, synthetic construct
  misc_feature 1..20: note = chemically synthesized
  source 1..20: mol_type = other DNA
tcctgcctcagcctcccaag

SEQ ID NO: 53152 - DNA, 20 bp, synthetic construct
  misc_feature 1..20: note = chemically synthesized
  source 1..20: mol_type = other DNA
gcctcagcctcccaagtagc

SEQ ID NO: 53153 - DNA, 20 bp, synthetic construct
  misc_feature 1..20: note = chemically synthesized
  source 1..20: mol_type = other DNA
cctcagcctcccaagtagct

SEQ ID NO: 53154 - DNA, 20 bp, synthetic construct
  misc_feature 1..20: note = chemically synthesized
  source 1..20: mol_type = other DNA
ctcccaagtagctgggatta

SEQ ID NO: 53155 - DNA, 20 bp, synthetic construct
  misc_feature 1..20: note = chemically synthesized
  source 1..20: mol_type = other DNA
tcccaagtagctgggattac

SEQ ID NO: 53156 - DNA, 20 bp, synthetic construct
  misc_feature 1..20: note = chemically synthesized
  source 1..20: mol_type = other DNA
caggtgcccgccaccatgcc

SEQ ID NO: 53157 - DNA, 20 bp, synthetic construct
  misc_feature 1..20: note = chemically synthesized
  source 1..20: mol_type = other DNA
gctaattttttttgtatttt

SEQ ID NO: 53158 - DNA, 20 bp, synthetic construct
  misc_feature 1..20: note = chemically synthesized
  source 1..20: mol_type = other DNA
aattttttttgtatttttag

SEQ ID NO: 53159 - DNA, 20 bp, synthetic construct
  misc_feature 1..20: note = chemically synthesized
  source 1..20: mol_type = other DNA
ttttttttgtatttttagta

SEQ ID NO: 53160 - DNA, 20 bp, synthetic construct
  misc_feature 1..20: note = chemically synthesized
  source 1..20: mol_type = other DNA
ttgtatttttagtagagaca

SEQ ID NO: 53161 - DNA, 20 bp, synthetic construct
  misc_feature 1..20: note = chemically synthesized
  source 1..20: mol_type = other DNA
catggtttcactatgttgac

SEQ ID NO: 53162 - DNA, 20 bp, synthetic construct
  misc_feature 1..20: note = chemically synthesized
  source 1..20: mol_type = other DNA
atggtttcactatgttgact

SEQ ID NO: 53163 - DNA, 20 bp, synthetic construct
  misc_feature 1..20: note = chemically synthesized
  source 1..20: mol_type = other DNA
tttcactatgttgactaggc

SEQ ID NO: 53164 - DNA, 20 bp, synthetic construct
  misc_feature 1..20: note = chemically synthesized
  source 1..20: mol_type = other DNA
acctcatgatctgcctgcct

SEQ ID NO: 53165 - DNA, 20 bp, synthetic construct
  misc_feature 1..20: note = chemically synthesized
  source 1..20: mol_type = other DNA
ctgcctgccttggcctccct

SEQ ID NO: 53166 - DNA, 20 bp, synthetic construct
  misc_feature 1..20: note = chemically synthesized
  source 1..20: mol_type = other DNA
gccttggcctccctaagtgc

SEQ ID NO: 53167 - DNA, 20 bp, synthetic construct
  misc_feature 1..20: note = chemically synthesized
  source 1..20: mol_type = other DNA
ccttggcctccctaagtgct

SEQ ID NO: 53168 - DNA, 20 bp, synthetic construct
  misc_feature 1..20: note = chemically synthesized
  source 1..20: mol_type = other DNA
ctccctaagtgctaggatta

SEQ ID NO: 53169 - DNA, 20 bp, synthetic construct
  misc_feature 1..20: note = chemically synthesized
  source 1..20: mol_type = other DNA
tccctaagtgctaggattac

SEQ ID NO: 53170 - DNA, 20 bp, synthetic construct
  misc_feature 1..20: note = chemically synthesized
  source 1..20: mol_type = other DNA
agtgctaggattacaggcgt

SEQ ID NO: 53171 - DNA, 20 bp, synthetic construct
  misc_feature 1..20: note = chemically synthesized
  source 1..20: mol_type = other DNA
caggcgtgagccactacacc

SEQ ID NO: 53172 - DNA, 20 bp, synthetic construct
  misc_feature 1..20: note = chemically synthesized
  source 1..20: mol_type = other DNA
gcatgattctaaaaaataaa

SEQ ID NO: 53173 - DNA, 20 bp, synthetic construct
  misc_feature 1..20: note = chemically synthesized
  source 1..20: mol_type = other DNA
ttctaaaaaataaaaagatg

SEQ ID NO: 53174 - DNA, 20 bp, synthetic construct
  misc_feature 1..20: note = chemically synthesized
  source 1..20: mol_type = other DNA
caaacatctgatctccattg

SEQ ID NO: 53175 - DNA, 20 bp, synthetic construct
  misc_feature 1..20: note = chemically synthesized
  source 1..20: mol_type = other DNA
gaagaaccatgcaatctctc

SEQ ID NO: 53176 - DNA, 20 bp, synthetic construct
  misc_feature 1..20: note = chemically synthesized
  source 1..20: mol_type = other DNA
aagaaccatgcaatctctct

SEQ ID NO: 53177 - DNA, 20 bp, synthetic construct
  misc_feature 1..20: note = chemically synthesized
  source 1..20: mol_type = other DNA
atgcaatctctctgggttga

SEQ ID NO: 53178 - DNA, 20 bp, synthetic construct
  misc_feature 1..20: note = chemically synthesized
  source 1..20: mol_type = other DNA
gcaatctctctgggttgata

SEQ ID NO: 53179 - DNA, 20 bp, synthetic construct
  misc_feature 1..20: note = chemically synthesized
  source 1..20: mol_type = other DNA
caatctctctgggttgatag

SEQ ID NO: 53180 - DNA, 20 bp, synthetic construct
  misc_feature 1..20: note = chemically synthesized
  source 1..20: mol_type = other DNA
ctctctgggttgatagaggc

SEQ ID NO: 53181 - DNA, 20 bp, synthetic construct
  misc_feature 1..20: note = chemically synthesized
  source 1..20: mol_type = other DNA
ctctgggttgatagaggcca

SEQ ID NO: 53182 - DNA, 20 bp, synthetic construct
  misc_feature 1..20: note = chemically synthesized
  source 1..20: mol_type = other DNA
gggttgatagaggccagagt

SEQ ID NO: 53183 - DNA, 20 bp, synthetic construct
  misc_feature 1..20: note = chemically synthesized
  source 1..20: mol_type = other DNA
ttgatagaggccagagttag

SEQ ID NO: 53184 - DNA, 20 bp, synthetic construct
  misc_feature 1..20: note = chemically synthesized
  source 1..20: mol_type = other DNA
ttagtggctctccctgattt

SEQ ID NO: 53185 - DNA, 20 bp, synthetic construct
  misc_feature 1..20: note = chemically synthesized
  source 1..20: mol_type = other DNA
tggctctccctgatttcggt

SEQ ID NO: 53186 - DNA, 20 bp, synthetic construct
  misc_feature 1..20: note = chemically synthesized
  source 1..20: mol_type = other DNA
aaatcactattccaccatca

SEQ ID NO: 53187 - DNA, 20 bp, synthetic construct
  misc_feature 1..20: note = chemically synthesized
  source 1..20: mol_type = other DNA
aatcactattccaccatcac

SEQ ID NO: 53188 - DNA, 20 bp, synthetic construct
  misc_feature 1..20: note = chemically synthesized
  source 1..20: mol_type = other DNA
attccaccatcacgggataa

SEQ ID NO: 53189 - DNA, 20 bp, synthetic construct
  misc_feature 1..20: note = chemically synthesized
  source 1..20: mol_type = other DNA
ttccaccatcacgggataaa

SEQ ID NO: 53190 - DNA, 20 bp, synthetic construct
  misc_feature 1..20: note = chemically synthesized
  source 1..20: mol_type = other DNA
gggataaaaggcatcctgac

SEQ ID NO: 53191 - DNA, 20 bp, synthetic construct
  misc_feature 1..20: note = chemically synthesized
  source 1..20: mol_type = other DNA
ataaaaggcatcctgactgg

SEQ ID NO: 53192 - DNA, 20 bp, synthetic construct
  misc_feature 1..20: note = chemically synthesized
  source 1..20: mol_type = other DNA
gcggttgacacctatttcca

SEQ ID NO: 53193 - DNA, 20 bp, synthetic construct
  misc_feature 1..20: note = chemically synthesized
  source 1..20: mol_type = other DNA
gacacctatttccacagtga

SEQ ID NO: 53194 - DNA, 20 bp, synthetic construct
  misc_feature 1..20: note = chemically synthesized
  source 1..20: mol_type = other DNA
tccacagtgaaagatatatc

SEQ ID NO: 53195 - DNA, 20 bp, synthetic construct
  misc_feature 1..20: note = chemically synthesized
  source 1..20: mol_type = other DNA
agatatatctagtactttta

SEQ ID NO: 53196 - DNA, 20 bp, synthetic construct
  misc_feature 1..20: note = chemically synthesized
  source 1..20: mol_type = other DNA
gatatatctagtacttttaa

SEQ ID NO: 53197 - DNA, 20 bp, synthetic construct
  misc_feature 1..20: note = chemically synthesized
  source 1..20: mol_type = other DNA
atatatctagtacttttaaa

SEQ ID NO: 53198 - DNA, 20 bp, synthetic construct
  misc_feature 1..20: note = chemically synthesized
  source 1..20: mol_type = other DNA
tatatctagtacttttaaag

SEQ ID NO: 53199 - DNA, 20 bp, synthetic construct
  misc_feature 1..20: note = chemically synthesized
  source 1..20: mol_type = other DNA
atctagtacttttaaagggg

SEQ ID NO: 53200 - DNA, 20 bp, synthetic construct
  misc_feature 1..20: note = chemically synthesized
  source 1..20: mol_type = other DNA
tagtacttttaaaggggaag

SEQ ID NO: 53201 - DNA, 20 bp, synthetic construct
  misc_feature 1..20: note = chemically synthesized
  source 1..20: mol_type = other DNA
aaaggggaagtggtttgtct

SEQ ID NO: 53202 - DNA, 20 bp, synthetic construct
  misc_feature 1..20: note = chemically synthesized
  source 1..20: mol_type = other DNA
gtctgagatactctgtttca

SEQ ID NO: 53203 - DNA, 20 bp, synthetic construct
  misc_feature 1..20: note = chemically synthesized
  source 1..20: mol_type = other DNA
tgagatactctgtttcaaag

SEQ ID NO: 53204 - DNA, 20 bp, synthetic construct
  misc_feature 1..20: note = chemically synthesized
  source 1..20: mol_type = other DNA
agatactctgtttcaaagta

SEQ ID NO: 53205 - DNA, 20 bp, synthetic construct
  misc_feature 1..20: note = chemically synthesized
  source 1..20: mol_type = other DNA
atactctgtttcaaagtaga

SEQ ID NO: 53206 - DNA, 20 bp, synthetic construct
  misc_feature 1..20: note = chemically synthesized
  source 1..20: mol_type = other DNA
tactctgtttcaaagtagag

SEQ ID NO: 53207 - DNA, 20 bp, synthetic construct
  misc_feature 1..20: note = chemically synthesized
  source 1..20: mol_type = other DNA
gtttcaaagtagagaggata

SEQ ID NO: 53208 - DNA, 20 bp, synthetic construct
  misc_feature 1..20: note = chemically synthesized
  source 1..20: mol_type = other DNA
aagtagagaggatacagaac

SEQ ID NO: 53209 - DNA, 20 bp, synthetic construct
  misc_feature 1..20: note = chemically synthesized
  source 1..20: mol_type = other DNA
ggatacagaacaagcatctg

SEQ ID NO: 53210 - DNA, 20 bp, synthetic construct
  misc_feature 1..20: note = chemically synthesized
  source 1..20: mol_type = other DNA
tgaagctatatacatcctta

SEQ ID NO: 53211 - DNA, 20 bp, synthetic construct
  misc_feature 1..20: note = chemically synthesized
  source 1..20: mol_type = other DNA
aagctatatacatccttaca

SEQ ID NO: 53212 - DNA, 20 bp, synthetic construct
  misc_feature 1..20: note = chemically synthesized
  source 1..20: mol_type = other DNA
gctatatacatccttacaga

SEQ ID NO: 53213 - DNA, 20 bp, synthetic construct
  misc_feature 1..20: note = chemically synthesized
  source 1..20: mol_type = other DNA
cttacagagagcaattctga

SEQ ID NO: 53214 - DNA, 20 bp, synthetic construct
  misc_feature 1..20: note = chemically synthesized
  source 1..20: mol_type = other DNA
gagcaattctgatggaaatg

SEQ ID NO: 53215 - DNA, 20 bp, synthetic construct
  misc_feature 1..20: note = chemically synthesized
  source 1..20: mol_type = other DNA
agcaattctgatggaaatgc

SEQ ID NO: 53216 - DNA, 20 bp, synthetic construct
  misc_feature 1..20: note = chemically synthesized
  source 1..20: mol_type = other DNA
aaatgcaggccatgtttccc

SEQ ID NO: 53217 - DNA, 20 bp, synthetic construct
  misc_feature 1..20: note = chemically synthesized
  source 1..20: mol_type = other DNA
aatgcaggccatgtttccct

SEQ ID NO: 53218 - DNA, 20 bp, synthetic construct
  misc_feature 1..20: note = chemically synthesized
  source 1..20: mol_type = other DNA
atgcaggccatgtttccctg

SEQ ID NO: 53219 - DNA, 20 bp, synthetic construct
  misc_feature 1..20: note = chemically synthesized
  source 1..20: mol_type = other DNA
tgcaggccatgtttccctgg

SEQ ID NO: 53220 - DNA, 20 bp, synthetic construct
  misc_feature 1..20: note = chemically synthesized
  source 1..20: mol_type = other DNA
gcaggccatgtttccctggg

SEQ ID NO: 53221 - DNA, 20 bp, synthetic construct
  misc_feature 1..20: note = chemically synthesized
  source 1..20: mol_type = other DNA
caggccatgtttccctgggg

SEQ ID NO: 53222 - DNA, 20 bp, synthetic construct
  misc_feature 1..20: note = chemically synthesized
  source 1..20: mol_type = other DNA
aggccatgtttccctggggg

SEQ ID NO: 53223 - DNA, 20 bp, synthetic construct
  misc_feature 1..20: note = chemically synthesized
  source 1..20: mol_type = other DNA
tccctggggggggctcgtcc

SEQ ID NO: 53224 - DNA, 20 bp, synthetic construct
  misc_feature 1..20: note = chemically synthesized
  source 1..20: mol_type = other DNA
ccctggggggggctcgtcct

SEQ ID NO: 53225 - DNA, 20 bp, synthetic construct
  misc_feature 1..20: note = chemically synthesized
  source 1..20: mol_type = other DNA
cctggggggggctcgtccta

SEQ ID NO: 53226 - DNA, 20 bp, synthetic construct
  misc_feature 1..20: note = chemically synthesized
  source 1..20: mol_type = other DNA
ctggggggggctcgtcctag

SEQ ID NO: 53227 - DNA, 20 bp, synthetic construct
  misc_feature 1..20: note = chemically synthesized
  source 1..20: mol_type = other DNA
ggggggctcgtcctaggggc

SEQ ID NO: 53228 - DNA, 20 bp, synthetic construct
  misc_feature 1..20: note = chemically synthesized
  source 1..20: mol_type = other DNA
ggggctcgtcctaggggctg

SEQ ID NO: 53229 - DNA, 20 bp, synthetic construct
  misc_feature 1..20: note = chemically synthesized
  source 1..20: mol_type = other DNA
tggagtgcattctctgatgt

SEQ ID NO: 53230 - DNA, 20 bp, synthetic construct
  misc_feature 1..20: note = chemically synthesized
  source 1..20: mol_type = other DNA
gagtgcattctctgatgtca

SEQ ID NO: 53231 - DNA, 20 bp, synthetic construct
  misc_feature 1..20: note = chemically synthesized
  source 1..20: mol_type = other DNA
agtgcattctctgatgtcag

SEQ ID NO: 53232 - DNA, 20 bp, synthetic construct
  misc_feature 1..20: note = chemically synthesized
  source 1..20: mol_type = other DNA
tctgatgtcagaggaaatgc

SEQ ID NO: 53233 - DNA, 20 bp, synthetic construct
  misc_feature 1..20: note = chemically synthesized
  source 1..20: mol_type = other DNA
gaggaaatgcaagattccct

SEQ ID NO: 53234 - DNA, 20 bp, synthetic construct
  misc_feature 1..20: note = chemically synthesized
  source 1..20: mol_type = other DNA
aggaaatgcaagattccctg

SEQ ID NO: 53235 - DNA, 20 bp, synthetic construct
  misc_feature 1..20: note = chemically synthesized
  source 1..20: mol_type = other DNA
tgcaagattccctgaggcct

SEQ ID NO: 53236 - DNA, 20 bp, synthetic construct
  misc_feature 1..20: note = chemically synthesized
  source 1..20: mol_type = other DNA
gcaagattccctgaggcctg

SEQ ID NO: 53237 - DNA, 20 bp, synthetic construct
  misc_feature 1..20: note = chemically synthesized
  source 1..20: mol_type = other DNA
caagattccctgaggcctga

SEQ ID NO: 53238 - DNA, 20 bp, synthetic construct
  misc_feature 1..20: note = chemically synthesized
  source 1..20: mol_type = other DNA
ctgaggcctgagggaaccca

SEQ ID NO: 53239 - DNA, 20 bp, synthetic construct
  misc_feature 1..20: note = chemically synthesized
  source 1..20: mol_type = other DNA
agggaacccatggtatatgc

SEQ ID NO: 53240 - DNA, 20 bp, synthetic construct
  misc_feature 1..20: note = chemically synthesized
  source 1..20: mol_type = other DNA
cccatggtatatgcaagtcc

SEQ ID NO: 53241 - DNA, 20 bp, synthetic construct
  misc_feature 1..20: note = chemically synthesized
  source 1..20: mol_type = other DNA
caagtccaagtttcaaactg

SEQ ID NO: 53242 - DNA, 20 bp, synthetic construct
  misc_feature 1..20: note = chemically synthesized
  source 1..20: mol_type = other DNA
tagttccatatgcattcttc

SEQ ID NO: 53243 - DNA, 20 bp, synthetic construct
  misc_feature 1..20: note = chemically synthesized
  source 1..20: mol_type = other DNA
agttccatatgcattcttcc

SEQ ID NO: 53244 - DNA, 20 bp, synthetic construct
  misc_feature 1..20: note = chemically synthesized
  source 1..20: mol_type = other DNA
ttccaggacaaatacttctt

SEQ ID NO: 53245 - DNA, 20 bp, synthetic construct
  misc_feature 1..20: note = chemically synthesized
  source 1..20: mol_type = other DNA
tccaggacaaatacttcttg

SEQ ID NO: 53246 - DNA, 20 bp, synthetic construct
  misc_feature 1..20: note = chemically synthesized
  source 1..20: mol_type = other DNA
ttcttgaggttaaaaaaaaa

SEQ ID NO: 53247 - DNA, 20 bp, synthetic construct
  misc_feature 1..20: note = chemically synthesized
  source 1..20: mol_type = other DNA
gttaaaaaaaaaaagtcaca

SEQ ID NO: 53248 - DNA, 20 bp, synthetic construct
  misc_feature 1..20: note = chemically synthesized
  source 1..20: mol_type = other DNA
gtcacatagctgccatttta

SEQ ID NO: 53249 - DNA, 20 bp, synthetic construct
  misc_feature 1..20: note = chemically synthesized
  source 1..20: mol_type = other DNA
agctgccattttatggattt

SEQ ID NO: 53250 - DNA, 20 bp, synthetic construct
  misc_feature 1..20: note = chemically synthesized
  source 1..20: mol_type = other DNA
gctgccattttatggatttc

SEQ ID NO: 53251 - DNA, 20 bp, synthetic construct
  misc_feature 1..20: note = chemically synthesized
  source 1..20: mol_type = other DNA
attttttttttttttttttt

SEQ ID NO: 53252 - DNA, 20 bp, synthetic construct
  misc_feature 1..20: note = chemically synthesized
  source 1..20: mol_type = other DNA
ttttttttttttttttgaga

SEQ ID NO: 53253 - DNA, 20 bp, synthetic construct
  misc_feature 1..20: note = chemically synthesized
  source 1..20: mol_type = other DNA
ttttttttttttttgagatg

SEQ ID NO: 53254 - DNA, 20 bp, synthetic construct
  misc_feature 1..20: note = chemically synthesized
  source 1..20: mol_type = other DNA
tggagtcttgctctgtcacc

SEQ ID NO: 53255 - DNA, 20 bp, synthetic construct
  misc_feature 1..20: note = chemically synthesized
  source 1..20: mol_type = other DNA
ttgctctgtcacccagcctg

SEQ ID NO: 53256 - DNA, 20 bp, synthetic construct
  misc_feature 1..20: note = chemically synthesized
  source 1..20: mol_type = other DNA
ctgtcacccagcctgtagtg

SEQ ID NO: 53257 - DNA, 20 bp, synthetic construct
  misc_feature 1..20: note = chemically synthesized
  source 1..20: mol_type = other DNA
tcacccagcctgtagtgcag

SEQ ID NO: 53258 - DNA, 20 bp, synthetic construct
  misc_feature 1..20: note = chemically synthesized
  source 1..20: mol_type = other DNA
gtagtgcagtggcataatct

SEQ ID NO: 53259 - DNA, 20 bp, synthetic construct
  misc_feature 1..20: note = chemically synthesized
  source 1..20: mol_type = other DNA
agtggcataatctcggctca

SEQ ID NO: 53260 - DNA, 20 bp, synthetic construct
  misc_feature 1..20: note = chemically synthesized
  source 1..20: mol_type = other DNA
tcacggcaacctccgcctcc

SEQ ID NO: 53261 - DNA, 20 bp, synthetic construct
  misc_feature 1..20: note = chemically synthesized
  source 1..20: mol_type = other DNA
cacggcaacctccgcctccc

SEQ ID NO: 53262 - DNA, 20 bp, synthetic construct
  misc_feature 1..20: note = chemically synthesized
  source 1..20: mol_type = other DNA
aacctccgcctcccaggttc

SEQ ID NO: 53263 - DNA, 20 bp, synthetic construct
  misc_feature 1..20: note = chemically synthesized
  source 1..20: mol_type = other DNA
ttcaagcgattctcttgcct

SEQ ID NO: 53264 - DNA, 20 bp, synthetic construct
  misc_feature 1..20: note = chemically synthesized
  source 1..20: mol_type = other DNA
ttctcttgccttagcctccc

SEQ ID NO: 53265 - DNA, 20 bp, synthetic construct
  misc_feature 1..20: note = chemically synthesized
  source 1..20: mol_type = other DNA
tcttgccttagcctcccgag

SEQ ID NO: 53266 - DNA, 20 bp, synthetic construct
  misc_feature 1..20: note = chemically synthesized
  source 1..20: mol_type = other DNA
gccttagcctcccgagtagc

SEQ ID NO: 53267 - DNA, 20 bp, synthetic construct
  misc_feature 1..20: note = chemically synthesized
  source 1..20: mol_type = other DNA
ccttagcctcccgagtagct

SEQ ID NO: 53268 - DNA, 20 bp, synthetic construct
  misc_feature 1..20: note = chemically synthesized
  source 1..20: mol_type = other DNA
ctcccgagtagctgggatta

SEQ ID NO: 53269 - DNA, 20 bp, synthetic construct
  misc_feature 1..20: note = chemically synthesized
  source 1..20: mol_type = other DNA
cagtcacgcaccaccacatc

SEQ ID NO: 53270 - DNA, 20 bp, synthetic construct
  misc_feature 1..20: note = chemically synthesized
  source 1..20: mol_type = other DNA
ggctaattctttatattttt

SEQ ID NO: 53271 - DNA, 20 bp, synthetic construct
  misc_feature 1..20: note = chemically synthesized
  source 1..20: mol_type = other DNA
taattctttatattttttgg

SEQ ID NO: 53272 - DNA, 20 bp, synthetic construct
  misc_feature 1..20: note = chemically synthesized
  source 1..20: mol_type = other DNA
tttatattttttggtagaaa

SEQ ID NO: 53273 - DNA, 20 bp, synthetic construct
  misc_feature 1..20: note = chemically synthesized
  source 1..20: mol_type = other DNA
gaaacggtgtttcaccatgt

SEQ ID NO: 53274 - DNA, 20 bp, synthetic construct
  misc_feature 1..20: note = chemically synthesized
  source 1..20: mol_type = other DNA
cggtgtttcaccatgttggc

SEQ ID NO: 53275 - DNA, 20 bp, synthetic construct
  misc_feature 1..20: note = chemically synthesized
  source 1..20: mol_type = other DNA
ggtgtttcaccatgttggcc

SEQ ID NO: 53276 - DNA, 20 bp, synthetic construct
  misc_feature 1..20: note = chemically synthesized
  source 1..20: mol_type = other DNA
tttcaccatgttggccaggc

SEQ ID NO: 53277 - DNA, 20 bp, synthetic construct
  misc_feature 1..20: note = chemically synthesized
  source 1..20: mol_type = other DNA
ctcatgtgatctgcctgcct

SEQ ID NO: 53278 - DNA, 20 bp, synthetic construct
  misc_feature 1..20: note = chemically synthesized
  source 1..20: mol_type = other DNA
ctgcctgccttggcctccca

SEQ ID NO: 53279 - DNA, 20 bp, synthetic construct
  misc_feature 1..20: note = chemically synthesized
  source 1..20: mol_type = other DNA
ccttggcctcccaaagtgct

SEQ ID NO: 53280 - DNA, 20 bp, synthetic construct
  misc_feature 1..20: note = chemically synthesized
  source 1..20: mol_type = other DNA
ctcccaaagtgctgagatta

SEQ ID NO: 53281 - DNA, 20 bp, synthetic construct
  misc_feature 1..20: note = chemically synthesized
  source 1..20: mol_type = other DNA
tcccaaagtgctgagattac

SEQ ID NO: 53282 - DNA, 20 bp, synthetic construct
  misc_feature 1..20: note = chemically synthesized
  source 1..20: mol_type = other DNA
agtgctgagattacaggtgt

SEQ ID NO: 53283 - DNA, 20 bp, synthetic construct
  misc_feature 1..20: note = chemically synthesized
  source 1..20: mol_type = other DNA
tgtgagccaccgcgcctgcc

SEQ ID NO: 53284 - DNA, 20 bp, synthetic construct
  misc_feature 1..20: note = chemically synthesized
  source 1..20: mol_type = other DNA
tgagccaccgcgcctgcctg

SEQ ID NO: 53285 - DNA, 20 bp, synthetic construct
  misc_feature 1..20: note = chemically synthesized
  source 1..20: mol_type = other DNA
caccgcgcctgcctggagtt

SEQ ID NO: 53286 - DNA, 20 bp, synthetic construct
  misc_feature 1..20: note = chemically synthesized
  source 1..20: mol_type = other DNA
ctgcctggagttcagaatct

SEQ ID NO: 53287 - DNA, 20 bp, synthetic construct
  misc_feature 1..20: note = chemically synthesized
  source 1..20: mol_type = other DNA
tgcctggagttcagaatctt

SEQ ID NO: 53288 - DNA, 20 bp, synthetic construct
  misc_feature 1..20: note = chemically synthesized
  source 1..20: mol_type = other DNA
cttcattatttgtgtttaaa

SEQ ID NO: 53289 - DNA, 20 bp, synthetic construct
  misc_feature 1..20: note = chemically synthesized
  source 1..20: mol_type = other DNA
ttgtgtttaaatagatcata

SEQ ID NO: 53290 - DNA, 20 bp, synthetic construct
  misc_feature 1..20: note = chemically synthesized
  source 1..20: mol_type = other DNA
gtttaaatagatcatacagt

SEQ ID NO: 53291 - DNA, 20 bp, synthetic construct
  misc_feature 1..20: note = chemically synthesized
  source 1..20: mol_type = other DNA
tttaaatagatcatacagtc

SEQ ID NO: 53292 - DNA, 20 bp, synthetic construct
  misc_feature 1..20: note = chemically synthesized
  source 1..20: mol_type = other DNA
atagatcatacagtcaggca

SEQ ID NO: 53293 - DNA, 20 bp, synthetic construct
  misc_feature 1..20: note = chemically synthesized
  source 1..20: mol_type = other DNA
gatcatacagtcaggcacgg

SEQ ID NO: 53294 - DNA, 20 bp, synthetic construct
  misc_feature 1..20: note = chemically synthesized
  source 1..20: mol_type = other DNA
gtggctcatgcctgtaatcc

SEQ ID NO: 53295 - DNA, 20 bp, synthetic construct
  misc_feature 1..20: note = chemically synthesized
  source 1..20: mol_type = other DNA
tgcctgtaatcccagcactt

SEQ ID NO: 53296 - DNA, 20 bp, synthetic construct
  misc_feature 1..20: note = chemically synthesized
  source 1..20: mol_type = other DNA
gcctgtaatcccagcacttt

SEQ ID NO: 53297 - DNA, 20 bp, synthetic construct
  misc_feature 1..20: note = chemically synthesized
  source 1..20: mol_type = other DNA
ctgtaatcccagcactttgg

SEQ ID NO: 53298 - DNA, 20 bp, synthetic construct
  misc_feature 1..20: note = chemically synthesized
  source 1..20: mol_type = other DNA
tgtaatcccagcactttggg

SEQ ID NO: 53299 - DNA, 20 bp, synthetic construct
  misc_feature 1..20: note = chemically synthesized
  source 1..20: mol_type = other DNA
tcccagcactttgggaggct

SEQ ID NO: 53300 - DNA, 20 bp, synthetic construct
  misc_feature 1..20: note = chemically synthesized
  source 1..20: mol_type = other DNA
cccagcactttgggaggctg

SEQ ID NO: 53301 - DNA, 20 bp, synthetic construct
  misc_feature 1..20: note = chemically synthesized
  source 1..20: mol_type = other DNA
agcactttgggaggctgagg

SEQ ID NO: 53302 - DNA, 20 bp, synthetic construct
  misc_feature 1..20: note = chemically synthesized
  source 1..20: mol_type = other DNA
gcactttgggaggctgaggt

SEQ ID NO: 53303 - DNA, 20 bp, synthetic construct
  misc_feature 1..20: note = chemically synthesized
  source 1..20: mol_type = other DNA
actttgggaggctgaggtgg

SEQ ID NO: 53304 - DNA, 20 bp, synthetic construct
  misc_feature 1..20: note = chemically synthesized
  source 1..20: mol_type = other DNA
ctttgggaggctgaggtggg

SEQ ID NO: 53305 - DNA, 20 bp, synthetic construct
  misc_feature 1..20: note = chemically synthesized
  source 1..20: mol_type = other DNA
ctgaggtgggaggattgcct

SEQ ID NO: 53306 - DNA, 20 bp, synthetic construct
  misc_feature 1..20: note = chemically synthesized
  source 1..20: mol_type = other DNA
gtgggaggattgcctgagtt

SEQ ID NO: 53307 - DNA, 20 bp, synthetic construct
  misc_feature 1..20: note = chemically synthesized
  source 1..20: mol_type = other DNA
tgggaggattgcctgagttc

SEQ ID NO: 53308 - DNA, 20 bp, synthetic construct
  misc_feature 1..20: note = chemically synthesized
  source 1..20: mol_type = other DNA
ggaggattgcctgagttcag

SEQ ID NO: 53309 - DNA, 20 bp, synthetic construct
  misc_feature 1..20: note = chemically synthesized
  source 1..20: mol_type = other DNA
gattgcctgagttcaggaga

SEQ ID NO: 53310 - DNA, 20 bp, synthetic construct
  misc_feature 1..20: note = chemically synthesized
  source 1..20: mol_type = other DNA
ttgcctgagttcaggagatg

SEQ ID NO: 53311 - DNA, 20 bp, synthetic construct
  misc_feature 1..20: note = chemically synthesized
  source 1..20: mol_type = other DNA
tgagttcaggagatggagac

SEQ ID NO: 53312 - DNA, 20 bp, synthetic construct
  misc_feature 1..20: note = chemically synthesized
  source 1..20: mol_type = other DNA
tcaggagatggagaccagcc

SEQ ID NO: 53313 - DNA, 20 bp, synthetic construct
  misc_feature 1..20: note = chemically synthesized
  source 1..20: mol_type = other DNA
caggagatggagaccagcct

SEQ ID NO: 53314 - DNA, 20 bp, synthetic construct
  misc_feature 1..20: note = chemically synthesized
  source 1..20: mol_type = other DNA
ggagaccagcctgggcaaca

SEQ ID NO: 53315 - DNA, 20 bp, synthetic construct
  misc_feature 1..20: note = chemically synthesized
  source 1..20: mol_type = other DNA
tctactaaaaatacaaaaac

SEQ ID NO: 53316 - DNA, 20 bp, synthetic construct
  misc_feature 1..20: note = chemically synthesized
  source 1..20: mol_type = other DNA
ctaaaaatacaaaaactagc

SEQ ID NO: 53317 - DNA, 20 bp, synthetic construct
  misc_feature 1..20: note = chemically synthesized
  source 1..20: mol_type = other DNA
atacaaaaactagctggatg

SEQ ID NO: 53318 - DNA, 20 bp, synthetic construct
  misc_feature 1..20: note = chemically synthesized
  source 1..20: mol_type = other DNA
caaaaactagctggatgtgg

SEQ ID NO: 53319 - DNA, 20 bp, synthetic construct
  misc_feature 1..20: note = chemically synthesized
  source 1..20: mol_type = other DNA
gatgtggtggcacacacctg

SEQ ID NO: 53320 - DNA, 20 bp, synthetic construct
  misc_feature 1..20: note = chemically synthesized
  source 1..20: mol_type = other DNA
gtggcacacacctgtagtcc

SEQ ID NO: 53321 - DNA, 20 bp, synthetic construct
  misc_feature 1..20: note = chemically synthesized
  source 1..20: mol_type = other DNA
cacctgtagtcccagctatt

SEQ ID NO: 53322 - DNA, 20 bp, synthetic construct
  misc_feature 1..20: note = chemically synthesized
  source 1..20: mol_type = other DNA
acctgtagtcccagctattc

SEQ ID NO: 53323 - DNA, 20 bp, synthetic construct
  misc_feature 1..20: note = chemically synthesized
  source 1..20: mol_type = other DNA
ctgtagtcccagctattcag

SEQ ID NO: 53324 - DNA, 20 bp, synthetic construct
  misc_feature 1..20: note = chemically synthesized
  source 1..20: mol_type = other DNA
tgtagtcccagctattcagg

SEQ ID NO: 53325 - DNA, 20 bp, synthetic construct
  misc_feature 1..20: note = chemically synthesized
  source 1..20: mol_type = other DNA
tcccagctattcaggaggct

SEQ ID NO: 53326 - DNA, 20 bp, synthetic construct
  misc_feature 1..20: note = chemically synthesized
  source 1..20: mol_type = other DNA
cccagctattcaggaggctg

SEQ ID NO: 53327 - DNA, 20 bp, synthetic construct
  misc_feature 1..20: note = chemically synthesized
  source 1..20: mol_type = other DNA
agctattcaggaggctgagg

SEQ ID NO: 53328 - DNA, 20 bp, synthetic construct
  misc_feature 1..20: note = chemically synthesized
  source 1..20: mol_type = other DNA
gctattcaggaggctgaggt

SEQ ID NO: 53329 - DNA, 20 bp, synthetic construct
  misc_feature 1..20: note = chemically synthesized
  source 1..20: mol_type = other DNA
tattcaggaggctgaggtgg

SEQ ID NO: 53330 - DNA, 20 bp, synthetic construct
  misc_feature 1..20: note = chemically synthesized
  source 1..20: mol_type = other DNA
attcaggaggctgaggtggg

SEQ ID NO: 53331 - DNA, 20 bp, synthetic construct
  misc_feature 1..20: note = chemically synthesized
  source 1..20: mol_type = other DNA
aggctgaggtgggaggatcc

SEQ ID NO: 53332 - DNA, 20 bp, synthetic construct
  misc_feature 1..20: note = chemically synthesized
  source 1..20: mol_type = other DNA
ggctgaggtgggaggatccc

SEQ ID NO: 53333 - DNA, 20 bp, synthetic construct
  misc_feature 1..20: note = chemically synthesized
  source 1..20: mol_type = other DNA
ctgaggtgggaggatcccag

SEQ ID NO: 53334 - DNA, 20 bp, synthetic construct
  misc_feature 1..20: note = chemically synthesized
  source 1..20: mol_type = other DNA
tgaggtgggaggatcccagg

SEQ ID NO: 53335 - DNA, 20 bp, synthetic construct
  misc_feature 1..20: note = chemically synthesized
  source 1..20: mol_type = other DNA
ggtgggaggatcccaggagg

SEQ ID NO: 53336 - DNA, 20 bp, synthetic construct
  misc_feature 1..20: note = chemically synthesized
  source 1..20: mol_type = other DNA
tgggaggatcccaggaggta

SEQ ID NO: 53337 - DNA, 20 bp, synthetic construct
  misc_feature 1..20: note = chemically synthesized
  source 1..20: mol_type = other DNA
gggaggatcccaggaggtag

SEQ ID NO: 53338 - DNA, 20 bp, synthetic construct
  misc_feature 1..20: note = chemically synthesized
  source 1..20: mol_type = other DNA
caggaggtagaggtcacaat

SEQ ID NO: 53339 - DNA, 20 bp, synthetic construct
  misc_feature 1..20: note = chemically synthesized
  source 1..20: mol_type = other DNA
ggtagaggtcacaatgagcc

SEQ ID NO: 53340 - DNA, 20 bp, synthetic construct
  misc_feature 1..20: note = chemically synthesized
  source 1..20: mol_type = other DNA
gagattgcgccactgcactc

SEQ ID NO: 53341 - DNA, 20 bp, synthetic construct
  misc_feature 1..20: note = chemically synthesized
  source 1..20: mol_type = other DNA
agattgcgccactgcactcc

SEQ ID NO: 53342 - DNA, 20 bp, synthetic construct
  misc_feature 1..20: note = chemically synthesized
  source 1..20: mol_type = other DNA
tgcgccactgcactccaggc

SEQ ID NO: 53343 - DNA, 20 bp, synthetic construct
  misc_feature 1..20: note = chemically synthesized
  source 1..20: mol_type = other DNA
gcgccactgcactccaggct

SEQ ID NO: 53344 - DNA, 20 bp, synthetic construct
  misc_feature 1..20: note = chemically synthesized
  source 1..20: mol_type = other DNA
gcactccaggctgggttact

SEQ ID NO: 53345 - DNA, 20 bp, synthetic construct
  misc_feature 1..20: note = chemically synthesized
  source 1..20: mol_type = other DNA
tccaggctgggttactgagc

SEQ ID NO: 53346 - DNA, 20 bp, synthetic construct
  misc_feature 1..20: note = chemically synthesized
  source 1..20: mol_type = other DNA
atcctgtctcaaaaaaaaaa

SEQ ID NO: 53347 - DNA, 20 bp, synthetic construct
  misc_feature 1..20: note = chemically synthesized
  source 1..20: mol_type = other DNA
aaaaagataatacattcaaa

SEQ ID NO: 53348 - DNA, 20 bp, synthetic construct
  misc_feature 1..20: note = chemically synthesized
  source 1..20: mol_type = other DNA
tcaaacagttcaaaatgcaa

SEQ ID NO: 53349 - DNA, 20 bp, synthetic construct
  misc_feature 1..20: note = chemically synthesized
  source 1..20: mol_type = other DNA
aatgcaaaagttacatacat

SEQ ID NO: 53350 - DNA, 20 bp, synthetic construct
  misc_feature 1..20: note = chemically synthesized
  source 1..20: mol_type = other DNA
atgcaaaagttacatacata

SEQ ID NO: 53351 - DNA, 20 bp, synthetic construct
  misc_feature 1..20: note = chemically synthesized
  source 1..20: mol_type = other DNA
caaaagttacatacataagg

SEQ ID NO: 53352 - DNA, 20 bp, synthetic construct
  misc_feature 1..20: note = chemically synthesized
  source 1..20: mol_type = other DNA
ctccctctcacacttctccc

SEQ ID NO: 53353 - DNA, 20 bp, synthetic construct
  misc_feature 1..20: note = chemically synthesized
  source 1..20: mol_type = other DNA
cacacttctccccagccacc

SEQ ID NO: 53354 - DNA, 20 bp, synthetic construct
  misc_feature 1..20: note = chemically synthesized
  source 1..20: mol_type = other DNA
agccacccagttctcccttc

SEQ ID NO: 53355 - DNA, 20 bp, synthetic construct
  misc_feature 1..20: note = chemically synthesized
  source 1..20: mol_type = other DNA
ccacccagttctcccttcta

SEQ ID NO: 53356 - DNA, 20 bp, synthetic construct
  misc_feature 1..20: note = chemically synthesized
  source 1..20: mol_type = other DNA
cacccagttctcccttctag

SEQ ID NO: 53357 - DNA, 20 bp, synthetic construct
  misc_feature 1..20: note = chemically synthesized
  source 1..20: mol_type = other DNA
gcaacatgtgaaatccttct

SEQ ID NO: 53358 - DNA, 20 bp, synthetic construct
  misc_feature 1..20: note = chemically synthesized
  source 1..20: mol_type = other DNA
caacatgtgaaatccttctc

SEQ ID NO: 53359 - DNA, 20 bp, synthetic construct
  misc_feature 1..20: note = chemically synthesized
  source 1..20: mol_type = other DNA
ctcaggctacactcttcttg

SEQ ID NO: 53360 - DNA, 20 bp, synthetic construct
  misc_feature 1..20: note = chemically synthesized
  source 1..20: mol_type = other DNA
tcaggctacactcttcttga

SEQ ID NO: 53361 - DNA, 20 bp, synthetic construct
  misc_feature 1..20: note = chemically synthesized
  source 1..20: mol_type = other DNA
ctacactcttcttgaaggtg

SEQ ID NO: 53362 - DNA, 20 bp, synthetic construct
  misc_feature 1..20: note = chemically synthesized
  source 1..20: mol_type = other DNA
tacactcttcttgaaggtgt

SEQ ID NO: 53363 - DNA, 20 bp, synthetic construct
  misc_feature 1..20: note = chemically synthesized
  source 1..20: mol_type = other DNA
cttcttgaaggtgtaggctt

SEQ ID NO: 53364 - DNA, 20 bp, synthetic construct
  misc_feature 1..20: note = chemically synthesized
  source 1..20: mol_type = other DNA
ttcttgaaggtgtaggcttt

SEQ ID NO: 53365 - DNA, 20 bp, synthetic construct
  misc_feature 1..20: note = chemically synthesized
  source 1..20: mol_type = other DNA
aaggtgtaggctttgggcaa

SEQ ID NO: 53366 - DNA, 20 bp, synthetic construct
  misc_feature 1..20: note = chemically synthesized
  source 1..20: mol_type = other DNA
tttgggcaaaagcattcatt

SEQ ID NO: 53367 - DNA, 20 bp, synthetic construct
  misc_feature 1..20: note = chemically synthesized
  source 1..20: mol_type = other DNA
aagcattcattcagtaaccc

SEQ ID NO: 53368 - DNA, 20 bp, synthetic construct
  misc_feature 1..20: note = chemically synthesized
  source 1..20: mol_type = other DNA
aaacttgttctgtttttcca

SEQ ID NO: 53369 - DNA, 20 bp, synthetic construct
  misc_feature 1..20: note = chemically synthesized
  source 1..20: mol_type = other DNA
aacttgttctgtttttccat

SEQ ID NO: 53370 - DNA, 20 bp, synthetic construct
  misc_feature 1..20: note = chemically synthesized
  source 1..20: mol_type = other DNA
tttttccataggattctctt

SEQ ID NO: 53371 - DNA, 20 bp, synthetic construct
  misc_feature 1..20: note = chemically synthesized
  source 1..20: mol_type = other DNA
tccataggattctctttgga

SEQ ID NO: 53372 - DNA, 20 bp, synthetic construct
  misc_feature 1..20: note = chemically synthesized
  source 1..20: mol_type = other DNA
tctttggacagcgtccatac

SEQ ID NO: 53373 - DNA, 20 bp, synthetic construct
  misc_feature 1..20: note = chemically synthesized
  source 1..20: mol_type = other DNA
ttggacagcgtccatactgg

SEQ ID NO: 53374 - DNA, 20 bp, synthetic construct
  misc_feature 1..20: note = chemically synthesized
  source 1..20: mol_type = other DNA
tggacagcgtccatactggt

SEQ ID NO: 53375 - DNA, 20 bp, synthetic construct
  misc_feature 1..20: note = chemically synthesized
  source 1..20: mol_type = other DNA
gcgtccatactggtgggttt

SEQ ID NO: 53376 - DNA, 20 bp, synthetic construct
  misc_feature 1..20: note = chemically synthesized
  source 1..20: mol_type = other DNA
gttttggatactgactacta

SEQ ID NO: 53377 - DNA, 20 bp, synthetic construct
  misc_feature 1..20: note = chemically synthesized
  source 1..20: mol_type = other DNA
acacttccgtgcccctgata

SEQ ID NO: 53378 - DNA, 20 bp, synthetic construct
  misc_feature 1..20: note = chemically synthesized
  source 1..20: mol_type = other DNA
cttccgtgcccctgataaag

SEQ ID NO: 53379 - DNA, 20 bp, synthetic construct
  misc_feature 1..20: note = chemically synthesized
  source 1..20: mol_type = other DNA
agcagttccctgtaacctgt

SEQ ID NO: 53380 - DNA, 20 bp, synthetic construct
  misc_feature 1..20: note = chemically synthesized
  source 1..20: mol_type = other DNA
ttccctgtaacctgtgagac

SEQ ID NO: 53381 - DNA, 20 bp, synthetic construct
  misc_feature 1..20: note = chemically synthesized
  source 1..20: mol_type = other DNA
tgtaacctgtgagactggac

SEQ ID NO: 53382 - DNA, 20 bp, synthetic construct
  misc_feature 1..20: note = chemically synthesized
  source 1..20: mol_type = other DNA
gtaacctgtgagactggacc

SEQ ID NO: 53383 - DNA, 20 bp, synthetic construct
  misc_feature 1..20: note = chemically synthesized
  source 1..20: mol_type = other DNA
cctgtgagactggaccaggt

SEQ ID NO: 53384 - DNA, 20 bp, synthetic construct
  misc_feature 1..20: note = chemically synthesized
  source 1..20: mol_type = other DNA
actggaccaggtaagcgtcc

SEQ ID NO: 53385 - DNA, 20 bp, synthetic construct
  misc_feature 1..20: note = chemically synthesized
  source 1..20: mol_type = other DNA
ggtaagcgtcccagcccctg

SEQ ID NO: 53386 - DNA, 20 bp, synthetic construct
  misc_feature 1..20: note = chemically synthesized
  source 1..20: mol_type = other DNA
agcgtcccagcccctgcaga

SEQ ID NO: 53387 - DNA, 20 bp, synthetic construct
  misc_feature 1..20: note = chemically synthesized
  source 1..20: mol_type = other DNA
gtcccagcccctgcagacag

SEQ ID NO: 53388 - DNA, 20 bp, synthetic construct
  misc_feature 1..20: note = chemically synthesized
  source 1..20: mol_type = other DNA
agcccctgcagacagaagct

SEQ ID NO: 53389 - DNA, 20 bp, synthetic construct
  misc_feature 1..20: note = chemically synthesized
  source 1..20: mol_type = other DNA
ccctgcagacagaagctgag

SEQ ID NO: 53390 - DNA, 20 bp, synthetic construct
  misc_feature 1..20: note = chemically synthesized
  source 1..20: mol_type = other DNA
tggacctcgtttacctgtta

SEQ ID NO: 53391 - DNA, 20 bp, synthetic construct
  misc_feature 1..20: note = chemically synthesized
  source 1..20: mol_type = other DNA
ttatggatgaaactgacctt

SEQ ID NO: 53392 - DNA, 20 bp, synthetic construct
  misc_feature 1..20: note = chemically synthesized
  source 1..20: mol_type = other DNA
tatggatgaaactgaccttg

SEQ ID NO: 53393 - DNA, 20 bp, synthetic construct
  misc_feature 1..20: note = chemically synthesized
  source 1..20: mol_type = other DNA
atggatgaaactgaccttga

SEQ ID NO: 53394 - DNA, 20 bp, synthetic construct
  misc_feature 1..20: note = chemically synthesized
  source 1..20: mol_type = other DNA
tggatgaaactgaccttgag

SEQ ID NO: 53395 - DNA, 20 bp, synthetic construct
  misc_feature 1..20: note = chemically synthesized
  source 1..20: mol_type = other DNA
aactgaccttgaggggacat

SEQ ID NO: 53396 - DNA, 20 bp, synthetic construct
  misc_feature 1..20: note = chemically synthesized
  source 1..20: mol_type = other DNA
actgaccttgaggggacatg

SEQ ID NO: 53397 - DNA, 20 bp, synthetic construct
  misc_feature 1..20: note = chemically synthesized
  source 1..20: mol_type = other DNA
tgaccttgaggggacatgag

SEQ ID NO: 53398 - DNA, 20 bp, synthetic construct
  misc_feature 1..20: note = chemically synthesized
  source 1..20: mol_type = other DNA
accttgaggggacatgagga

SEQ ID NO: 53399 - DNA, 20 bp, synthetic construct
  misc_feature 1..20: note = chemically synthesized
  source 1..20: mol_type = other DNA
cttttgtcatgctcttcaat

SEQ ID NO: 53400 - DNA, 20 bp, synthetic construct
  misc_feature 1..20: note = chemically synthesized
  source 1..20: mol_type = other DNA
ttctgcaatactttcctgaa

SEQ ID NO: 53401 - DNA, 20 bp, synthetic construct
  misc_feature 1..20: note = chemically synthesized
  source 1..20: mol_type = other DNA
caatactttcctgaatagca

SEQ ID NO: 53402 - DNA, 20 bp, synthetic construct
  misc_feature 1..20: note = chemically synthesized
  source 1..20: mol_type = other DNA
tactttcctgaatagcacag

SEQ ID NO: 53403 - DNA, 20 bp, synthetic construct
  misc_feature 1..20: note = chemically synthesized
  source 1..20: mol_type = other DNA
cctgaatagcacagtagtat

SEQ ID NO: 53404 - DNA, 20 bp, synthetic construct
  misc_feature 1..20: note = chemically synthesized
  source 1..20: mol_type = other DNA
tattggaaatctgcctatta

SEQ ID NO: 53405 - DNA, 20 bp, synthetic construct
  misc_feature 1..20: note = chemically synthesized
  source 1..20: mol_type = other DNA
aatctgcctattacagaacc

SEQ ID NO: 53406 - DNA, 20 bp, synthetic construct
  misc_feature 1..20: note = chemically synthesized
  source 1..20: mol_type = other DNA
tgcctattacagaacctgga

SEQ ID NO: 53407 - DNA, 20 bp, synthetic construct
  misc_feature 1..20: note = chemically synthesized
  source 1..20: mol_type = other DNA
cctattacagaacctggatg

SEQ ID NO: 53408 - DNA, 20 bp, synthetic construct
  misc_feature 1..20: note = chemically synthesized
  source 1..20: mol_type = other DNA
tacagaacctggatggagtc

SEQ ID NO: 53409 - DNA, 20 bp, synthetic construct
  misc_feature 1..20: note = chemically synthesized
  source 1..20: mol_type = other DNA
cagaacctggatggagtcca

SEQ ID NO: 53410 - DNA, 20 bp, synthetic construct
  misc_feature 1..20: note = chemically synthesized
  source 1..20: mol_type = other DNA
gaacctggatggagtccaga

SEQ ID NO: 53411 - DNA, 20 bp, synthetic construct
  misc_feature 1..20: note = chemically synthesized
  source 1..20: mol_type = other DNA
aacctggatggagtccagag

SEQ ID NO: 53412 - DNA, 20 bp, synthetic construct
  misc_feature 1..20: note = chemically synthesized
  source 1..20: mol_type = other DNA
ggatggagtccagagaggca

SEQ ID NO: 53413 - DNA, 20 bp, synthetic construct
  misc_feature 1..20: note = chemically synthesized
  source 1..20: mol_type = other DNA
gatggagtccagagaggcac

SEQ ID NO: 53414 - DNA, 20 bp, synthetic construct
  misc_feature 1..20: note = chemically synthesized
  source 1..20: mol_type = other DNA
cagagaggcacgggcatcca

SEQ ID NO: 53415 - DNA, 20 bp, synthetic construct
  misc_feature 1..20: note = chemically synthesized
  source 1..20: mol_type = other DNA
agagaggcacgggcatccat

SEQ ID NO: 53416 - DNA, 20 bp, synthetic construct
  misc_feature 1..20: note = chemically synthesized
  source 1..20: mol_type = other DNA
ggcacgggcatccatgggca

SEQ ID NO: 53417 - DNA, 20 bp, synthetic construct
  misc_feature 1..20: note = chemically synthesized
  source 1..20: mol_type = other DNA
gcacgggcatccatgggcaa

SEQ ID NO: 53418 - DNA, 20 bp, synthetic construct
  misc_feature 1..20: note = chemically synthesized
  source 1..20: mol_type = other DNA
cacgggcatccatgggcaaa

SEQ ID NO: 53419 - DNA, 20 bp, synthetic construct
  misc_feature 1..20: note = chemically synthesized
  source 1..20: mol_type = other DNA
tccatgggcaaagggctcgt

SEQ ID NO: 53420 - DNA, 20 bp, synthetic construct
  misc_feature 1..20: note = chemically synthesized
  source 1..20: mol_type = other DNA
catgggcaaagggctcgtga

SEQ ID NO: 53421 - DNA, 20 bp, synthetic construct
  misc_feature 1..20: note = chemically synthesized
  source 1..20: mol_type = other DNA
tcgtgagagtcaccgccctg

SEQ ID NO: 53422 - DNA, 20 bp, synthetic construct
  misc_feature 1..20: note = chemically synthesized
  source 1..20: mol_type = other DNA
gccctgcagcgctgtgtcct

SEQ ID NO: 53423 - DNA, 20 bp, synthetic construct
  misc_feature 1..20: note = chemically synthesized
  source 1..20: mol_type = other DNA
tgcagcgctgtgtcctgaga

SEQ ID NO: 53424 - DNA, 20 bp, synthetic construct
  misc_feature 1..20: note = chemically synthesized
  source 1..20: mol_type = other DNA
gcagcgctgtgtcctgagaa

SEQ ID NO: 53425 - DNA, 20 bp, synthetic construct
  misc_feature 1..20: note = chemically synthesized
  source 1..20: mol_type = other DNA
agcgctgtgtcctgagaaag

SEQ ID NO: 53426 - DNA, 20 bp, synthetic construct
  misc_feature 1..20: note = chemically synthesized
  source 1..20: mol_type = other DNA
gcgctgtgtcctgagaaagg

SEQ ID NO: 53427 - DNA, 20 bp, synthetic construct
  misc_feature 1..20: note = chemically synthesized
  source 1..20: mol_type = other DNA
cgctgtgtcctgagaaagga

SEQ ID NO: 53428 - DNA, 20 bp, synthetic construct
  misc_feature 1..20: note = chemically synthesized
  source 1..20: mol_type = other DNA
gctgtgtcctgagaaaggag

SEQ ID NO: 53429 - DNA, 20 bp, synthetic construct
  misc_feature 1..20: note = chemically synthesized
  source 1..20: mol_type = other DNA
ctgtgtcctgagaaaggagg

SEQ ID NO: 53430 - DNA, 20 bp, synthetic construct
  misc_feature 1..20: note = chemically synthesized
  source 1..20: mol_type = other DNA
tgtcctgagaaaggaggggg

SEQ ID NO: 53431 - DNA, 20 bp, synthetic construct
  misc_feature 1..20: note = chemically synthesized
  source 1..20: mol_type = other DNA
cctgagaaaggagggggcag

SEQ ID NO: 53432 - DNA, 20 bp, synthetic construct
  misc_feature 1..20: note = chemically synthesized
  source 1..20: mol_type = other DNA
aaaggagggggcagaagcct

SEQ ID NO: 53433 - DNA, 20 bp, synthetic construct
  misc_feature 1..20: note = chemically synthesized
  source 1..20: mol_type = other DNA
ggggcagaagcctgagcttc

SEQ ID NO: 53434 - DNA, 20 bp, synthetic construct
  misc_feature 1..20: note = chemically synthesized
  source 1..20: mol_type = other DNA
gggcagaagcctgagcttct

SEQ ID NO: 53435 - DNA, 20 bp, synthetic construct
  misc_feature 1..20: note = chemically synthesized
  source 1..20: mol_type = other DNA
ggcagaagcctgagcttctg

SEQ ID NO: 53436 - DNA, 20 bp, synthetic construct
  misc_feature 1..20: note = chemically synthesized
  source 1..20: mol_type = other DNA
gcagaagcctgagcttctgg

SEQ ID NO: 53437 - DNA, 20 bp, synthetic construct
  misc_feature 1..20: note = chemically synthesized
  source 1..20: mol_type = other DNA
cttctgggggtccttcccaa

SEQ ID NO: 53438 - DNA, 20 bp, synthetic construct
  misc_feature 1..20: note = chemically synthesized
  source 1..20: mol_type = other DNA
gggggtccttcccaatggcc

SEQ ID NO: 53439 - DNA, 20 bp, synthetic construct
  misc_feature 1..20: note = chemically synthesized
  source 1..20: mol_type = other DNA
ttcccaatggcctggcccac

SEQ ID NO: 53440 - DNA, 20 bp, synthetic construct
  misc_feature 1..20: note = chemically synthesized
  source 1..20: mol_type = other DNA
cccactggatgtgccctcct

SEQ ID NO: 53441 - DNA, 20 bp, synthetic construct
  misc_feature 1..20: note = chemically synthesized
  source 1..20: mol_type = other DNA
tctctgtgcctacgttttat

SEQ ID NO: 53442 - DNA, 20 bp, synthetic construct
  misc_feature 1..20: note = chemically synthesized
  source 1..20: mol_type = other DNA
tgcctacgttttattagtta

SEQ ID NO: 53443 - DNA, 20 bp, synthetic construct
  misc_feature 1..20: note = chemically synthesized
  source 1..20: mol_type = other DNA
tacgttttattagttacagc

SEQ ID NO: 53444 - DNA, 20 bp, synthetic construct
  misc_feature 1..20: note = chemically synthesized
  source 1..20: mol_type = other DNA
ttttattagttacagccaga

SEQ ID NO: 53445 - DNA, 20 bp, synthetic construct
  misc_feature 1..20: note = chemically synthesized
  source 1..20: mol_type = other DNA
gttactgtcaaatcaaatga

SEQ ID NO: 53446 - DNA, 20 bp, synthetic construct
  misc_feature 1..20: note = chemically synthesized
  source 1..20: mol_type = other DNA
caaatgatagatttcatttt

SEQ ID NO: 53447 - DNA, 20 bp, synthetic construct
  misc_feature 1..20: note = chemically synthesized
  source 1..20: mol_type = other DNA
atttcattttcagtatgtaa

SEQ ID NO: 53448 - DNA, 20 bp, synthetic construct
  misc_feature 1..20: note = chemically synthesized
  source 1..20: mol_type = other DNA
tttcattttcagtatgtaat

SEQ ID NO: 53449 - DNA, 20 bp, synthetic construct
  misc_feature 1..20: note = chemically synthesized
  source 1..20: mol_type = other DNA
cattttcagtatgtaatagg

SEQ ID NO: 53450 - DNA, 20 bp, synthetic construct
  misc_feature 1..20: note = chemically synthesized
  source 1..20: mol_type = other DNA
gaagcccctccctcacccta

SEQ ID NO: 53451 - DNA, 20 bp, synthetic construct
  misc_feature 1..20: note = chemically synthesized
  source 1..20: mol_type = other DNA
cctccctcaccctaaagtct

SEQ ID NO: 53452 - DNA, 20 bp, synthetic construct
  misc_feature 1..20: note = chemically synthesized
  source 1..20: mol_type = other DNA
taaagtctcagctgccctct

SEQ ID NO: 53453 - DNA, 20 bp, synthetic construct
  misc_feature 1..20: note = chemically synthesized
  source 1..20: mol_type = other DNA
tctcagctgccctctaagac

SEQ ID NO: 53454 - DNA, 20 bp, synthetic construct
  misc_feature 1..20: note = chemically synthesized
  source 1..20: mol_type = other DNA
ctctaagactagtactctct

SEQ ID NO: 53455 - DNA, 20 bp, synthetic construct
  misc_feature 1..20: note = chemically synthesized
  source 1..20: mol_type = other DNA
tctaagactagtactctcta

SEQ ID NO: 53456 - DNA, 20 bp, synthetic construct
  misc_feature 1..20: note = chemically synthesized
  source 1..20: mol_type = other DNA
actagtactctctaaggtac

SEQ ID NO: 53457 - DNA, 20 bp, synthetic construct
  misc_feature 1..20: note = chemically synthesized
  source 1..20: mol_type = other DNA
aggtactagtatcccttcct

SEQ ID NO: 53458 - DNA, 20 bp, synthetic construct
  misc_feature 1..20: note = chemically synthesized
  source 1..20: mol_type = other DNA
gtactagtatcccttcctca

SEQ ID NO: 53459 - DNA, 20 bp, synthetic construct
  misc_feature 1..20: note = chemically synthesized
  source 1..20: mol_type = other DNA
cctttccctgaccccaaaac

SEQ ID NO: 53460 - DNA, 20 bp, synthetic construct
  misc_feature 1..20: note = chemically synthesized
  source 1..20: mol_type = other DNA
ctttccctgaccccaaaact

SEQ ID NO: 53461 - DNA, 20 bp, synthetic construct
  misc_feature 1..20: note = chemically synthesized
  source 1..20: mol_type = other DNA
tttccctgaccccaaaacta

SEQ ID NO: 53462 - DNA, 20 bp, synthetic construct
  misc_feature 1..20: note = chemically synthesized
  source 1..20: mol_type = other DNA
ccctgaccccaaaactaggg

SEQ ID NO: 53463 - DNA, 20 bp, synthetic construct
  misc_feature 1..20: note = chemically synthesized
  source 1..20: mol_type = other DNA
cctgaccccaaaactaggga

SEQ ID NO: 53464 - DNA, 20 bp, synthetic construct
  misc_feature 1..20: note = chemically synthesized
  source 1..20: mol_type = other DNA
caaaactagggaaggtccct

SEQ ID NO: 53465 - DNA, 20 bp, synthetic construct
  misc_feature 1..20: note = chemically synthesized
  source 1..20: mol_type = other DNA
cccttagttatttgctctca

SEQ ID NO: 53466 - DNA, 20 bp, synthetic construct
  misc_feature 1..20: note = chemically synthesized
  source 1..20: mol_type = other DNA
cacagaccacgcatttacct

SEQ ID NO: 53467 - DNA, 20 bp, synthetic construct
  misc_feature 1..20: note = chemically synthesized
  source 1..20: mol_type = other DNA
cagaccacgcatttacctca

SEQ ID NO: 53468 - DNA, 20 bp, synthetic construct
  misc_feature 1..20: note = chemically synthesized
  source 1..20: mol_type = other DNA
tcagagcatattcactcatt

SEQ ID NO: 53469 - DNA, 20 bp, synthetic construct
  misc_feature 1..20: note = chemically synthesized
  source 1..20: mol_type = other DNA
tcattcagctgttacttacc

SEQ ID NO: 53470 - DNA, 20 bp, synthetic construct
  misc_feature 1..20: note = chemically synthesized
  source 1..20: mol_type = other DNA
gttacttaccaagcacctac

SEQ ID NO: 53471 - DNA, 20 bp, synthetic construct
  misc_feature 1..20: note = chemically synthesized
  source 1..20: mol_type = other DNA
ttacttaccaagcacctact

SEQ ID NO: 53472 - DNA, 20 bp, synthetic construct
  misc_feature 1..20: note = chemically synthesized
  source 1..20: mol_type = other DNA
acttaccaagcacctactgg

SEQ ID NO: 53473 - DNA, 20 bp, synthetic construct
  misc_feature 1..20: note = chemically synthesized
  source 1..20: mol_type = other DNA
ctatacactgttctatgtgc

SEQ ID NO: 53474 - DNA, 20 bp, synthetic construct
  misc_feature 1..20: note = chemically synthesized
  source 1..20: mol_type = other DNA
tatacactgttctatgtgct

SEQ ID NO: 53475 - DNA, 20 bp, synthetic construct
  misc_feature 1..20: note = chemically synthesized
  source 1..20: mol_type = other DNA
atacactgttctatgtgcta

SEQ ID NO: 53476 - DNA, 20 bp, synthetic construct
  misc_feature 1..20: note = chemically synthesized
  source 1..20: mol_type = other DNA
tgtgctagggatacctctgt

SEQ ID NO: 53477 - DNA, 20 bp, synthetic construct
  misc_feature 1..20: note = chemically synthesized
  source 1..20: mol_type = other DNA
acctctgtcagtgaacaaca

SEQ ID NO: 53478 - DNA, 20 bp, synthetic construct
  misc_feature 1..20: note = chemically synthesized
  source 1..20: mol_type = other DNA
cagtgaacaacacagacaca

SEQ ID NO: 53479 - DNA, 20 bp, synthetic construct
  misc_feature 1..20: note = chemically synthesized
  source 1..20: mol_type = other DNA
cacaaagatccctgcccttg

SEQ ID NO: 53480 - DNA, 20 bp, synthetic construct
  misc_feature 1..20: note = chemically synthesized
  source 1..20: mol_type = other DNA
caaagatccctgcccttgtg

SEQ ID NO: 53481 - DNA, 20 bp, synthetic construct
  misc_feature 1..20: note = chemically synthesized
  source 1..20: mol_type = other DNA
ttgtggagctgaaatctgaa

SEQ ID NO: 53482 - DNA, 20 bp, synthetic construct
  misc_feature 1..20: note = chemically synthesized
  source 1..20: mol_type = other DNA
gtggagctgaaatctgaata

SEQ ID NO: 53483 - DNA, 20 bp, synthetic construct
  misc_feature 1..20: note = chemically synthesized
  source 1..20: mol_type = other DNA
tggagctgaaatctgaatag

SEQ ID NO: 53484 - DNA, 20 bp, synthetic construct
  misc_feature 1..20: note = chemically synthesized
  source 1..20: mol_type = other DNA
gagctgaaatctgaatagag

SEQ ID NO: 53485 - DNA, 20 bp, synthetic construct
  misc_feature 1..20: note = chemically synthesized
  source 1..20: mol_type = other DNA
agctgaaatctgaatagagg

SEQ ID NO: 53486 - DNA, 20 bp, synthetic construct
  misc_feature 1..20: note = chemically synthesized
  source 1..20: mol_type = other DNA
atacaaaaattataataaat

SEQ ID NO: 53487 - DNA, 20 bp, synthetic construct
  misc_feature 1..20: note = chemically synthesized
  source 1..20: mol_type = other DNA
attataataaataagtaaac

SEQ ID NO: 53488 - DNA, 20 bp, synthetic construct
  misc_feature 1..20: note = chemically synthesized
  source 1..20: mol_type = other DNA
ttataataaataagtaaact

SEQ ID NO: 53489 - DNA, 20 bp, synthetic construct
  misc_feature 1..20: note = chemically synthesized
  source 1..20: mol_type = other DNA
aataaataagtaaactaggc

SEQ ID NO: 53490 - DNA, 20 bp, synthetic construct
  misc_feature 1..20: note = chemically synthesized
  source 1..20: mol_type = other DNA
taagtaaactaggccagttg

SEQ ID NO: 53491 - DNA, 20 bp, synthetic construct
  misc_feature 1..20: note = chemically synthesized
  source 1..20: mol_type = other DNA
gttgctcatgcctgtaatcc

SEQ ID NO: 53492 - DNA, 20 bp, synthetic construct
  misc_feature 1..20: note = chemically synthesized
  source 1..20: mol_type = other DNA
tgcctgtaatcccagcactt

SEQ ID NO: 53493 - DNA, 20 bp, synthetic construct
  misc_feature 1..20: note = chemically synthesized
  source 1..20: mol_type = other DNA
gcctgtaatcccagcacttt

SEQ ID NO: 53494 - DNA, 20 bp, synthetic construct
  misc_feature 1..20: note = chemically synthesized
  source 1..20: mol_type = other DNA
tgtaatcccagcactttggg

SEQ ID NO: 53495 - DNA, 20 bp, synthetic construct
  misc_feature 1..20: note = chemically synthesized
  source 1..20: mol_type = other DNA
tcccagcactttgggaagcc

SEQ ID NO: 53496 - DNA, 20 bp, synthetic construct
  misc_feature 1..20: note = chemically synthesized
  source 1..20: mol_type = other DNA
cccagcactttgggaagcca

SEQ ID NO: 53497 - DNA, 20 bp, synthetic construct
  misc_feature 1..20: note = chemically synthesized
  source 1..20: mol_type = other DNA
agcactttgggaagccaagg

SEQ ID NO: 53498 - DNA, 20 bp, synthetic construct
  misc_feature 1..20: note = chemically synthesized
  source 1..20: mol_type = other DNA
gcactttgggaagccaaggt

SEQ ID NO: 53499 - DNA, 20 bp, synthetic construct
  misc_feature 1..20: note = chemically synthesized
  source 1..20: mol_type = other DNA
ctttgggaagccaaggtagg

SEQ ID NO: 53500 - DNA, 20 bp, synthetic construct
  misc_feature 1..20: note = chemically synthesized
  source 1..20: mol_type = other DNA
ccaaggtaggtagatcacct

SEQ ID NO: 53501 - DNA, 20 bp, synthetic construct
  misc_feature 1..20: note = chemically synthesized
  source 1..20: mol_type = other DNA
caaggtaggtagatcacctg

SEQ ID NO: 53502 - DNA, 20 bp, synthetic construct
  misc_feature 1..20: note = chemically synthesized
  source 1..20: mol_type = other DNA
gtaggtagatcacctgaggt

SEQ ID NO: 53503 - DNA, 20 bp, synthetic construct
  misc_feature 1..20: note = chemically synthesized
  source 1..20: mol_type = other DNA
taggtagatcacctgaggtc

SEQ ID NO: 53504 - DNA, 20 bp, synthetic construct
  misc_feature 1..20: note = chemically synthesized
  source 1..20: mol_type = other DNA
ggtagatcacctgaggtcag

SEQ ID NO: 53505 - DNA, 20 bp, synthetic construct
  misc_feature 1..20: note = chemically synthesized
  source 1..20: mol_type = other DNA
tgaggtcaggagttcaaaac

SEQ ID NO: 53506 - DNA, 20 bp, synthetic construct
  misc_feature 1..20: note = chemically synthesized
  source 1..20: mol_type = other DNA
tcaggagttcaaaaccagcc

SEQ ID NO: 53507 - DNA, 20 bp, synthetic construct
  misc_feature 1..20: note = chemically synthesized
  source 1..20: mol_type = other DNA
aatcctgtctttactaaaaa

SEQ ID NO: 53508 - DNA, 20 bp, synthetic construct
  misc_feature 1..20: note = chemically synthesized
  source 1..20: mol_type = other DNA
tttactaaaaatggaaaaat

SEQ ID NO: 53509 - DNA, 20 bp, synthetic construct
  misc_feature 1..20: note = chemically synthesized
  source 1..20: mol_type = other DNA
ctaaaaatggaaaaattggt

SEQ ID NO: 53510 - DNA, 20 bp, synthetic construct
  misc_feature 1..20: note = chemically synthesized
  source 1..20: mol_type = other DNA
taaaaatggaaaaattggtc

SEQ ID NO: 53511 - DNA, 20 bp, synthetic construct
  misc_feature 1..20: note = chemically synthesized
  source 1..20: mol_type = other DNA
gaaaaattggtcaggcgtga

SEQ ID NO: 53512 - DNA, 20 bp, synthetic construct
  misc_feature 1..20: note = chemically synthesized
  source 1..20: mol_type = other DNA
ggcgtgatggcacacgcctg

SEQ ID NO: 53513 - DNA, 20 bp, synthetic construct
  misc_feature 1..20: note = chemically synthesized
  source 1..20: mol_type = other DNA
atggcacacgcctgtagtct

SEQ ID NO: 53514 - DNA, 20 bp, synthetic construct
  misc_feature 1..20: note = chemically synthesized
  source 1..20: mol_type = other DNA
cgcctgtagtctcagctacc

SEQ ID NO: 53515 - DNA, 20 bp, synthetic construct
  misc_feature 1..20: note = chemically synthesized
  source 1..20: mol_type = other DNA
gcctgtagtctcagctacct

SEQ ID NO: 53516 - DNA, 20 bp, synthetic construct
  misc_feature 1..20: note = chemically synthesized
  source 1..20: mol_type = other DNA
ctgtagtctcagctacctgg

SEQ ID NO: 53517 - DNA, 20 bp, synthetic construct
  misc_feature 1..20: note = chemically synthesized
  source 1..20: mol_type = other DNA
tgtagtctcagctacctggg

SEQ ID NO: 53518 - DNA, 20 bp, synthetic construct
  misc_feature 1..20: note = chemically synthesized
  source 1..20: mol_type = other DNA
tctcagctacctgggaggct

SEQ ID NO: 53519 - DNA, 20 bp, synthetic construct
  misc_feature 1..20: note = chemically synthesized
  source 1..20: mol_type = other DNA
ctcagctacctgggaggctg

SEQ ID NO: 53520 - DNA, 20 bp, synthetic construct
  misc_feature 1..20: note = chemically synthesized
  source 1..20: mol_type = other DNA
agctacctgggaggctgagg

SEQ ID NO: 53521 - DNA, 20 bp, synthetic construct
  misc_feature 1..20: note = chemically synthesized
  source 1..20: mol_type = other DNA
gctacctgggaggctgaggc

SEQ ID NO: 53522 - DNA, 20 bp, synthetic construct
  misc_feature 1..20: note = chemically synthesized
  source 1..20: mol_type = other DNA
tacctgggaggctgaggcag

SEQ ID NO: 53523 - DNA, 20 bp, synthetic construct
  misc_feature 1..20: note = chemically synthesized
  source 1..20: mol_type = other DNA
gcaggagaatcgcttgaacc

SEQ ID NO: 53524 - DNA, 20 bp, synthetic construct
  misc_feature 1..20: note = chemically synthesized
  source 1..20: mol_type = other DNA
caggagaatcgcttgaacct

SEQ ID NO: 53525 - DNA, 20 bp, synthetic construct
  misc_feature 1..20: note = chemically synthesized
  source 1..20: mol_type = other DNA
ggagaatcgcttgaacctgg

SEQ ID NO: 53526 - DNA, 20 bp, synthetic construct
  misc_feature 1..20: note = chemically synthesized
  source 1..20: mol_type = other DNA
gagaatcgcttgaacctggg

SEQ ID NO: 53527 - DNA, 20 bp, synthetic construct
  misc_feature 1..20: note = chemically synthesized
  source 1..20: mol_type = other DNA
aatcgcttgaacctgggagg

SEQ ID NO: 53528 - DNA, 20 bp, synthetic construct
  misc_feature 1..20: note = chemically synthesized
  source 1..20: mol_type = other DNA
tcgcttgaacctgggaggca

SEQ ID NO: 53529 - DNA, 20 bp, synthetic construct
  misc_feature 1..20: note = chemically synthesized
  source 1..20: mol_type = other DNA
cgcttgaacctgggaggcag

SEQ ID NO: 53530 - DNA, 20 bp, synthetic construct
  misc_feature 1..20: note = chemically synthesized
  source 1..20: mol_type = other DNA
aacctgggaggcagaggttg

SEQ ID NO: 53531 - DNA, 20 bp, synthetic construct
  misc_feature 1..20: note = chemically synthesized
  source 1..20: mol_type = other DNA
ggcagaggttgcagtgaacc

SEQ ID NO: 53532 - DNA, 20 bp, synthetic construct
  misc_feature 1..20: note = chemically synthesized
  source 1..20: mol_type = other DNA
aggttgcagtgaaccgagat

SEQ ID NO: 53533 - DNA, 20 bp, synthetic construct
  misc_feature 1..20: note = chemically synthesized
  source 1..20: mol_type = other DNA
gagatcggaccactgcactc

SEQ ID NO: 53534 - DNA, 20 bp, synthetic construct
  misc_feature 1..20: note = chemically synthesized
  source 1..20: mol_type = other DNA
ctgcactccagcctgaatga

SEQ ID NO: 53535 - DNA, 20 bp, synthetic construct
  misc_feature 1..20: note = chemically synthesized
  source 1..20: mol_type = other DNA
tccagcctgaatgacagaac

SEQ ID NO: 53536 - DNA, 20 bp, synthetic construct
  misc_feature 1..20: note = chemically synthesized
  source 1..20: mol_type = other DNA
gagactctgtctcaaaaaaa

SEQ ID NO: 53537 - DNA, 20 bp, synthetic construct
  misc_feature 1..20: note = chemically synthesized
  source 1..20: mol_type = other DNA
aaaagtaaactattaatatg

SEQ ID NO: 53538 - DNA, 20 bp, synthetic construct
  misc_feature 1..20: note = chemically synthesized
  source 1..20: mol_type = other DNA
aaagtaaactattaatatgt

SEQ ID NO: 53539 - DNA, 20 bp, synthetic construct
  misc_feature 1..20: note = chemically synthesized
  source 1..20: mol_type = other DNA
taaactattaatatgtagga

SEQ ID NO: 53540 - DNA, 20 bp, synthetic construct
  misc_feature 1..20: note = chemically synthesized
  source 1..20: mol_type = other DNA
aaactattaatatgtaggat

SEQ ID NO: 53541 - DNA, 20 bp, synthetic construct
  misc_feature 1..20: note = chemically synthesized
  source 1..20: mol_type = other DNA
tattaatatgtaggataggc

SEQ ID NO: 53542 - DNA, 20 bp, synthetic construct
  misc_feature 1..20: note = chemically synthesized
  source 1..20: mol_type = other DNA
attaatatgtaggataggcc

SEQ ID NO: 53543 - DNA, 20 bp, synthetic construct
  misc_feature 1..20: note = chemically synthesized
  source 1..20: mol_type = other DNA
tatgtaggataggccaggca

SEQ ID NO: 53544 - DNA, 20 bp, synthetic construct
  misc_feature 1..20: note = chemically synthesized
  source 1..20: mol_type = other DNA
gtaggataggccaggcacgg

SEQ ID NO: 53545 - DNA, 20 bp, synthetic construct
  misc_feature 1..20: note = chemically synthesized
  source 1..20: mol_type = other DNA
ggtggctcaccctgtaatcc

SEQ ID NO: 53546 - DNA, 20 bp, synthetic construct
  misc_feature 1..20: note = chemically synthesized
  source 1..20: mol_type = other DNA
accctgtaatcccagcactt

SEQ ID NO: 53547 - DNA, 20 bp, synthetic construct
  misc_feature 1..20: note = chemically synthesized
  source 1..20: mol_type = other DNA
ccctgtaatcccagcacttt

SEQ ID NO: 53548 - DNA, 20 bp, synthetic construct
  misc_feature 1..20: note = chemically synthesized
  source 1..20: mol_type = other DNA
ctgtaatcccagcactttgg

SEQ ID NO: 53549 - DNA, 20 bp, synthetic construct
  misc_feature 1..20: note = chemically synthesized
  source 1..20: mol_type = other DNA
tgtaatcccagcactttggg

SEQ ID NO: 53550 - DNA, 20 bp, synthetic construct
  misc_feature 1..20: note = chemically synthesized
  source 1..20: mol_type = other DNA
tcccagcactttgggaggct

SEQ ID NO: 53551 - DNA, 20 bp, synthetic construct
  misc_feature 1..20: note = chemically synthesized
  source 1..20: mol_type = other DNA
cccagcactttgggaggctg

SEQ ID NO: 53552 - DNA, 20 bp, synthetic construct
  misc_feature 1..20: note = chemically synthesized
  source 1..20: mol_type = other DNA
agcactttgggaggctgagg

SEQ ID NO: 53553 - DNA, 20 bp, synthetic construct
  misc_feature 1..20: note = chemically synthesized
  source 1..20: mol_type = other DNA
gcactttgggaggctgaggc

SEQ ID NO: 53554 - DNA, 20 bp, synthetic construct
  misc_feature 1..20: note = chemically synthesized
  source 1..20: mol_type = other DNA
ctttgggaggctgaggcggg

SEQ ID NO: 53555 - DNA, 20 bp, synthetic construct
  misc_feature 1..20: note = chemically synthesized
  source 1..20: mol_type = other DNA
ctgaggcgggtggatcacct

SEQ ID NO: 53556 - DNA, 20 bp, synthetic construct
  misc_feature 1..20: note = chemically synthesized
  source 1..20: mol_type = other DNA
tgaggcgggtggatcacctg

SEQ ID NO: 53557 - DNA, 20 bp, synthetic construct
  misc_feature 1..20: note = chemically synthesized
  source 1..20: mol_type = other DNA
gcgggtggatcacctgaggt

SEQ ID NO: 53558 - DNA, 20 bp, synthetic construct
  misc_feature 1..20: note = chemically synthesized
  source 1..20: mol_type = other DNA
cgggtggatcacctgaggtg

SEQ ID NO: 53559 - DNA, 20 bp, synthetic construct
  misc_feature 1..20: note = chemically synthesized
  source 1..20: mol_type = other DNA
ggtggatcacctgaggtgag

SEQ ID NO: 53560 - DNA, 20 bp, synthetic construct
  misc_feature 1..20: note = chemically synthesized
  source 1..20: mol_type = other DNA
tcacctgaggtgaggagttc

SEQ ID NO: 53561 - DNA, 20 bp, synthetic construct
  misc_feature 1..20: note = chemically synthesized
  source 1..20: mol_type = other DNA
tgaggtgaggagttcaagac

SEQ ID NO: 53562 - DNA, 20 bp, synthetic construct
  misc_feature 1..20: note = chemically synthesized
  source 1..20: mol_type = other DNA
tgaggagttcaagaccagcc

SEQ ID NO: 53563 - DNA, 20 bp, synthetic construct
  misc_feature 1..20: note = chemically synthesized
  source 1..20: mol_type = other DNA
caagaccagcctggccaaca

SEQ ID NO: 53564 - DNA, 20 bp, synthetic construct
  misc_feature 1..20: note = chemically synthesized
  source 1..20: mol_type = other DNA
tctactaaaaatacaaaaat

SEQ ID NO: 53565 - DNA, 20 bp, synthetic construct
  misc_feature 1..20: note = chemically synthesized
  source 1..20: mol_type = other DNA
ctaaaaatacaaaaattagc

SEQ ID NO: 53566 - DNA, 20 bp, synthetic construct
  misc_feature 1..20: note = chemically synthesized
  source 1..20: mol_type = other DNA
taaaaatacaaaaattagct

SEQ ID NO: 53567 - DNA, 20 bp, synthetic construct
  misc_feature 1..20: note = chemically synthesized
  source 1..20: mol_type = other DNA
caaaaattagctgggtgtcc

SEQ ID NO: 53568 - DNA, 20 bp, synthetic construct
  misc_feature 1..20: note = chemically synthesized
  source 1..20: mol_type = other DNA
ctggtgcatgcctgtaatct

SEQ ID NO: 53569 - DNA, 20 bp, synthetic construct
  misc_feature 1..20: note = chemically synthesized
  source 1..20: mol_type = other DNA
tgcctgtaatctgagctact

SEQ ID NO: 53570 - DNA, 20 bp, synthetic construct
  misc_feature 1..20: note = chemically synthesized
  source 1..20: mol_type = other DNA
gcctgtaatctgagctactc

SEQ ID NO: 53571 - DNA, 20 bp, synthetic construct
  misc_feature 1..20: note = chemically synthesized
  source 1..20: mol_type = other DNA
ctgtaatctgagctactcag

SEQ ID NO: 53572 - DNA, 20 bp, synthetic construct
  misc_feature 1..20: note = chemically synthesized
  source 1..20: mol_type = other DNA
tgtaatctgagctactcagg

SEQ ID NO: 53573 - DNA, 20 bp, synthetic construct
  misc_feature 1..20: note = chemically synthesized
  source 1..20: mol_type = other DNA
tctgagctactcaggaggct

SEQ ID NO: 53574 - DNA, 20 bp, synthetic construct
  misc_feature 1..20: note = chemically synthesized
  source 1..20: mol_type = other DNA
ctgagctactcaggaggcta

SEQ ID NO: 53575 - DNA, 20 bp, synthetic construct
  misc_feature 1..20: note = chemically synthesized
  source 1..20: mol_type = other DNA
agctactcaggaggctaagg

SEQ ID NO: 53576 - DNA, 20 bp, synthetic construct
  misc_feature 1..20: note = chemically synthesized
  source 1..20: mol_type = other DNA
gctactcaggaggctaaggc

SEQ ID NO: 53577 - DNA, 20 bp, synthetic construct
  misc_feature 1..20: note = chemically synthesized
  source 1..20: mol_type = other DNA
tactcaggaggctaaggcag

SEQ ID NO: 53578 - DNA, 20 bp, synthetic construct
  misc_feature 1..20: note = chemically synthesized
  source 1..20: mol_type = other DNA
gcaggagaatcgcttgaacc

SEQ ID NO: 53579 - DNA, 20 bp, synthetic construct
  misc_feature 1..20: note = chemically synthesized
  source 1..20: mol_type = other DNA
caggagaatcgcttgaacct

SEQ ID NO: 53580 - DNA, 20 bp, synthetic construct
  misc_feature 1..20: note = chemically synthesized
  source 1..20: mol_type = other DNA
ggagaatcgcttgaacctgg

SEQ ID NO: 53581 - DNA, 20 bp, synthetic construct
  misc_feature 1..20: note = chemically synthesized
  source 1..20: mol_type = other DNA
gagaatcgcttgaacctggg

SEQ ID NO: 53582 - DNA, 20 bp, synthetic construct
  misc_feature 1..20: note = chemically synthesized
  source 1..20: mol_type = other DNA
aatcgcttgaacctgggagg

SEQ ID NO: 53583 - DNA, 20 bp, synthetic construct
  misc_feature 1..20: note = chemically synthesized
  source 1..20: mol_type = other DNA
gcttgaacctgggaggtggt

SEQ ID NO: 53584 - DNA, 20 bp, synthetic construct
  misc_feature 1..20: note = chemically synthesized
  source 1..20: mol_type = other DNA
aacctgggaggtggtgagcc

SEQ ID NO: 53585 - DNA, 20 bp, synthetic construct
  misc_feature 1..20: note = chemically synthesized
  source 1..20: mol_type = other DNA
aagattgcgccattgcactc

SEQ ID NO: 53586 - DNA, 20 bp, synthetic construct
  misc_feature 1..20: note = chemically synthesized
  source 1..20: mol_type = other DNA
tgcgccattgcactccagcc

SEQ ID NO: 53587 - DNA, 20 bp, synthetic construct
  misc_feature 1..20: note = chemically synthesized
  source 1..20: mol_type = other DNA
gcgccattgcactccagcct

SEQ ID NO: 53588 - DNA, 20 bp, synthetic construct
  misc_feature 1..20: note = chemically synthesized
  source 1..20: mol_type = other DNA
tccagcctgggcgacaaaat

SEQ ID NO: 53589 - DNA, 20 bp, synthetic construct
  misc_feature 1..20: note = chemically synthesized
  source 1..20: mol_type = other DNA
cacacacacacatataatac

SEQ ID NO: 53590 - DNA, 20 bp, synthetic construct
  misc_feature 1..20: note = chemically synthesized
  source 1..20: mol_type = other DNA
tactagaaaatgattgttta

SEQ ID NO: 53591 - DNA, 20 bp, synthetic construct
  misc_feature 1..20: note = chemically synthesized
  source 1..20: mol_type = other DNA
actagaaaatgattgtttat

SEQ ID NO: 53592 - DNA, 20 bp, synthetic construct
  misc_feature 1..20: note = chemically synthesized
  source 1..20: mol_type = other DNA
tataggcaaaaaaaaaaaaa

SEQ ID NO: 53593 - DNA, 20 bp, synthetic construct
  misc_feature 1..20: note = chemically synthesized
  source 1..20: mol_type = other DNA
aggcaaaaaaaaaaaaaaag

SEQ ID NO: 53594 - DNA, 20 bp, synthetic construct
  misc_feature 1..20: note = chemically synthesized
  source 1..20: mol_type = other DNA
caaaaaaaaaaaaaaagaag

SEQ ID NO: 53595 - DNA, 20 bp, synthetic construct
  misc_feature 1..20: note = chemically synthesized
  source 1..20: mol_type = other DNA
aaaaaaaaaaaaagaagaag

SEQ ID NO: 53596 - DNA, 20 bp, synthetic construct
  misc_feature 1..20: note = chemically synthesized
  source 1..20: mol_type = other DNA
aaaaaaaaaagaagaagaag

SEQ ID NO: 53597 - DNA, 20 bp, synthetic construct
  misc_feature 1..20: note = chemically synthesized
  source 1..20: mol_type = other DNA
aaaaagaagaagaagaagaa

SEQ ID NO: 53598 - DNA, 20 bp, synthetic construct
  misc_feature 1..20: note = chemically synthesized
  source 1..20: mol_type = other DNA
aaaagaagaagaagaagaaa

SEQ ID NO: 53599 - DNA, 20 bp, synthetic construct
  misc_feature 1..20: note = chemically synthesized
  source 1..20: mol_type = other DNA
gaagaagaagaagaaaagga

SEQ ID NO: 53600 - DNA, 20 bp, synthetic construct
  misc_feature 1..20: note = chemically synthesized
  source 1..20: mol_type = other DNA
aagaagaagaagaaaaggaa

SEQ ID NO: 53601 - DNA, 20 bp, synthetic construct
  misc_feature 1..20: note = chemically synthesized
  source 1..20: mol_type = other DNA
gaagaagaagaaaaggaaag

SEQ ID NO: 53602 - DNA, 20 bp, synthetic construct
  misc_feature 1..20: note = chemically synthesized
  source 1..20: mol_type = other DNA
gaagaagaaaaggaaaggag

SEQ ID NO: 53603 - DNA, 20 bp, synthetic construct
  misc_feature 1..20: note = chemically synthesized
  source 1..20: mol_type = other DNA
aagaagaaaaggaaaggaga

SEQ ID NO: 53604 - DNA, 20 bp, synthetic construct
  misc_feature 1..20: note = chemically synthesized
  source 1..20: mol_type = other DNA
agaaaaggaaaggagaagga

SEQ ID NO: 53605 - DNA, 20 bp, synthetic construct
  misc_feature 1..20: note = chemically synthesized
  source 1..20: mol_type = other DNA
aaaggaaaggagaaggaaag

SEQ ID NO: 53606 - DNA, 20 bp, synthetic construct
  misc_feature 1..20: note = chemically synthesized
  source 1..20: mol_type = other DNA
aaggaaaggagaaggaaaga

SEQ ID NO: 53607 - DNA, 20 bp, synthetic construct
  misc_feature 1..20: note = chemically synthesized
  source 1..20: mol_type = other DNA
gaaggaccaaacatcttttg

SEQ ID NO: 53608 - DNA, 20 bp, synthetic construct
  misc_feature 1..20: note = chemically synthesized
  source 1..20: mol_type = other DNA
tatgtttgctttcatcataa

SEQ ID NO: 53609 - DNA, 20 bp, synthetic construct
  misc_feature 1..20: note = chemically synthesized
  source 1..20: mol_type = other DNA
catcataacagcttgttatc

SEQ ID NO: 53610 - DNA, 20 bp, synthetic construct
  misc_feature 1..20: note = chemically synthesized
  source 1..20: mol_type = other DNA
atcataacagcttgttatca

SEQ ID NO: 53611 - DNA, 20 bp, synthetic construct
  misc_feature 1..20: note = chemically synthesized
  source 1..20: mol_type = other DNA
gaatttctccctgaaattaa

SEQ ID NO: 53612 - DNA, 20 bp, synthetic construct
  misc_feature 1..20: note = chemically synthesized
  source 1..20: mol_type = other DNA
atttctccctgaaattaatg

SEQ ID NO: 53613 - DNA, 20 bp, synthetic construct
  misc_feature 1..20: note = chemically synthesized
  source 1..20: mol_type = other DNA
tttctccctgaaattaatgg

SEQ ID NO: 53614 - DNA, 20 bp, synthetic construct
  misc_feature 1..20: note = chemically synthesized
  source 1..20: mol_type = other DNA
ccctgaaattaatggaggca

SEQ ID NO: 53615 - DNA, 20 bp, synthetic construct
  misc_feature 1..20: note = chemically synthesized
  source 1..20: mol_type = other DNA
aaattaatggaggcacagac

SEQ ID NO: 53616 - DNA, 20 bp, synthetic construct
  misc_feature 1..20: note = chemically synthesized
  source 1..20: mol_type = other DNA
taatggaggcacagactgga

SEQ ID NO: 53617 - DNA, 20 bp, synthetic construct
  misc_feature 1..20: note = chemically synthesized
  source 1..20: mol_type = other DNA
ggcacagactggaaagttta

SEQ ID NO: 53618 - DNA, 20 bp, synthetic construct
  misc_feature 1..20: note = chemically synthesized
  source 1..20: mol_type = other DNA
acagactggaaagtttaaag

SEQ ID NO: 53619 - DNA, 20 bp, synthetic construct
  misc_feature 1..20: note = chemically synthesized
  source 1..20: mol_type = other DNA
ggaaagtttaaagtggcttt

SEQ ID NO: 53620 - DNA, 20 bp, synthetic construct
  misc_feature 1..20: note = chemically synthesized
  source 1..20: mol_type = other DNA
aaagtttaaagtggctttaa

SEQ ID NO: 53621 - DNA, 20 bp, synthetic construct
  misc_feature 1..20: note = chemically synthesized
  source 1..20: mol_type = other DNA
aagtttaaagtggctttaag

SEQ ID NO: 53622 - DNA, 20 bp, synthetic construct
  misc_feature 1..20: note = chemically synthesized
  source 1..20: mol_type = other DNA
ctttaagaggttattttatt

SEQ ID NO: 53623 - DNA, 20 bp, synthetic construct
  misc_feature 1..20: note = chemically synthesized
  source 1..20: mol_type = other DNA
tatttagtcctctgtcttaa

SEQ ID NO: 53624 - DNA, 20 bp, synthetic construct
  misc_feature 1..20: note = chemically synthesized
  source 1..20: mol_type = other DNA
ttagtcctctgtcttaatag

SEQ ID NO: 53625 - DNA, 20 bp, synthetic construct
  misc_feature 1..20: note = chemically synthesized
  source 1..20: mol_type = other DNA
aaattattatctctgctcct

SEQ ID NO: 53626 - DNA, 20 bp, synthetic construct
  misc_feature 1..20: note = chemically synthesized
  source 1..20: mol_type = other DNA
aattattatctctgctcctt

SEQ ID NO: 53627 - DNA, 20 bp, synthetic construct
  misc_feature 1..20: note = chemically synthesized
  source 1..20: mol_type = other DNA
tattatctctgctccttagg

SEQ ID NO: 53628 - DNA, 20 bp, synthetic construct
  misc_feature 1..20: note = chemically synthesized
  source 1..20: mol_type = other DNA
ttatctctgctccttaggta

SEQ ID NO: 53629 - DNA, 20 bp, synthetic construct
  misc_feature 1..20: note = chemically synthesized
  source 1..20: mol_type = other DNA
tctctgctccttaggtagag

SEQ ID NO: 53630 - DNA, 20 bp, synthetic construct
  misc_feature 1..20: note = chemically synthesized
  source 1..20: mol_type = other DNA
gctccttaggtagagtagct

SEQ ID NO: 53631 - DNA, 20 bp, synthetic construct
  misc_feature 1..20: note = chemically synthesized
  source 1..20: mol_type = other DNA
ctccttaggtagagtagcta

SEQ ID NO: 53632 - DNA, 20 bp, synthetic construct
  misc_feature 1..20: note = chemically synthesized
  source 1..20: mol_type = other DNA
taggtagagtagctaaggct

SEQ ID NO: 53633 - DNA, 20 bp, synthetic construct
  misc_feature 1..20: note = chemically synthesized
  source 1..20: mol_type = other DNA
tagagtagctaaggctcaga

SEQ ID NO: 53634 - DNA, 20 bp, synthetic construct
  misc_feature 1..20: note = chemically synthesized
  source 1..20: mol_type = other DNA
agtagctaaggctcagaaag

SEQ ID NO: 53635 - DNA, 20 bp, synthetic construct
  misc_feature 1..20: note = chemically synthesized
  source 1..20: mol_type = other DNA
gtagctaaggctcagaaagt

SEQ ID NO: 53636 - DNA, 20 bp, synthetic construct
  misc_feature 1..20: note = chemically synthesized
  source 1..20: mol_type = other DNA
ctaaggctcagaaagtaggc

SEQ ID NO: 53637 - DNA, 20 bp, synthetic construct
  misc_feature 1..20: note = chemically synthesized
  source 1..20: mol_type = other DNA
taaggctcagaaagtaggcc

SEQ ID NO: 53638 - DNA, 20 bp, synthetic construct
  misc_feature 1..20: note = chemically synthesized
  source 1..20: mol_type = other DNA
ctcagaaagtaggccgggcg

SEQ ID NO: 53639 - DNA, 20 bp, synthetic construct
  misc_feature 1..20: note = chemically synthesized
  source 1..20: mol_type = other DNA
agaaagtaggccgggcgcgg

SEQ ID NO: 53640 - DNA, 20 bp, synthetic construct
  misc_feature 1..20: note = chemically synthesized
  source 1..20: mol_type = other DNA
gtggctcacgcctgtaatcc

SEQ ID NO: 53641 - DNA, 20 bp, synthetic construct
  misc_feature 1..20: note = chemically synthesized
  source 1..20: mol_type = other DNA
cgcctgtaatcctagcactt

SEQ ID NO: 53642 - DNA, 20 bp, synthetic construct
  misc_feature 1..20: note = chemically synthesized
  source 1..20: mol_type = other DNA
gcctgtaatcctagcacttt

SEQ ID NO: 53643 - DNA, 20 bp, synthetic construct
  misc_feature 1..20: note = chemically synthesized
  source 1..20: mol_type = other DNA
ctgtaatcctagcactttgg

SEQ ID NO: 53644 - DNA, 20 bp, synthetic construct
  misc_feature 1..20: note = chemically synthesized
  source 1..20: mol_type = other DNA
tgtaatcctagcactttggg

SEQ ID NO: 53645 - DNA, 20 bp, synthetic construct
  misc_feature 1..20: note = chemically synthesized
  source 1..20: mol_type = other DNA
agcactttgggaggccaacg

SEQ ID NO: 53646 - DNA, 20 bp, synthetic construct
  misc_feature 1..20: note = chemically synthesized
  source 1..20: mol_type = other DNA
gcactttgggaggccaacgc

SEQ ID NO: 53647 - DNA, 20 bp, synthetic construct
  misc_feature 1..20: note = chemically synthesized
  source 1..20: mol_type = other DNA
ctttgggaggccaacgcagg

SEQ ID NO: 53648 - DNA, 20 bp, synthetic construct
  misc_feature 1..20: note = chemically synthesized
  source 1..20: mol_type = other DNA
ccaacgcaggtggatcacct

SEQ ID NO: 53649 - DNA, 20 bp, synthetic construct
  misc_feature 1..20: note = chemically synthesized
  source 1..20: mol_type = other DNA
caacgcaggtggatcacctg

SEQ ID NO: 53650 - DNA, 20 bp, synthetic construct
  misc_feature 1..20: note = chemically synthesized
  source 1..20: mol_type = other DNA
gcaggtggatcacctgaggt

SEQ ID NO: 53651 - DNA, 20 bp, synthetic construct
  misc_feature 1..20: note = chemically synthesized
  source 1..20: mol_type = other DNA
caggtggatcacctgaggtc

SEQ ID NO: 53652 - DNA, 20 bp, synthetic construct
  misc_feature 1..20: note = chemically synthesized
  source 1..20: mol_type = other DNA
ggtggatcacctgaggtcag

SEQ ID NO: 53653 - DNA, 20 bp, synthetic construct
  misc_feature 1..20: note = chemically synthesized
  source 1..20: mol_type = other DNA
tcacctgaggtcaggagttt

SEQ ID NO: 53654 - DNA, 20 bp, synthetic construct
  misc_feature 1..20: note = chemically synthesized
  source 1..20: mol_type = other DNA
tgaggtcaggagtttgagac

SEQ ID NO: 53655 - DNA, 20 bp, synthetic construct
  misc_feature 1..20: note = chemically synthesized
  source 1..20: mol_type = other DNA
tcaggagtttgagaccagcc

SEQ ID NO: 53656 - DNA, 20 bp, synthetic construct
  misc_feature 1..20: note = chemically synthesized
  source 1..20: mol_type = other DNA
tgagaccagcctggccaaca

SEQ ID NO: 53657 - DNA, 20 bp, synthetic construct
  misc_feature 1..20: note = chemically synthesized
  source 1..20: mol_type = other DNA
aataaaaaaatacaaaaact

SEQ ID NO: 53658 - DNA, 20 bp, synthetic construct
  misc_feature 1..20: note = chemically synthesized
  source 1..20: mol_type = other DNA
aaaaaatacaaaaacttagc

SEQ ID NO: 53659 - DNA, 20 bp, synthetic construct
  misc_feature 1..20: note = chemically synthesized
  source 1..20: mol_type = other DNA
aaaaatacaaaaacttagcc

SEQ ID NO: 53660 - DNA, 20 bp, synthetic construct
  misc_feature 1..20: note = chemically synthesized
  source 1..20: mol_type = other DNA
tacaaaaacttagccaggca

SEQ ID NO: 53661 - DNA, 20 bp, synthetic construct
  misc_feature 1..20: note = chemically synthesized
  source 1..20: mol_type = other DNA
aaaaacttagccaggcatgg

SEQ ID NO: 53662 - DNA, 20 bp, synthetic construct
  misc_feature 1..20: note = chemically synthesized
  source 1..20: mol_type = other DNA
aacttagccaggcatggtgg

SEQ ID NO: 53663 - DNA, 20 bp, synthetic construct
  misc_feature 1..20: note = chemically synthesized
  source 1..20: mol_type = other DNA
acttagccaggcatggtggc

SEQ ID NO: 53664 - DNA, 20 bp, synthetic construct
  misc_feature 1..20: note = chemically synthesized
  source 1..20: mol_type = other DNA
gtggcgggcgcctgtaatcc

SEQ ID NO: 53665 - DNA, 20 bp, synthetic construct
  misc_feature 1..20: note = chemically synthesized
  source 1..20: mol_type = other DNA
cgcctgtaatcccagctacc

SEQ ID NO: 53666 - DNA, 20 bp, synthetic construct
  misc_feature 1..20: note = chemically synthesized
  source 1..20: mol_type = other DNA
gcctgtaatcccagctaccc

SEQ ID NO: 53667 - DNA, 20 bp, synthetic construct
  misc_feature 1..20: note = chemically synthesized
  source 1..20: mol_type = other DNA
ctgtaatcccagctacccag

SEQ ID NO: 53668 - DNA, 20 bp, synthetic construct
  misc_feature 1..20: note = chemically synthesized
  source 1..20: mol_type = other DNA
tgtaatcccagctacccagg

SEQ ID NO: 53669 - DNA, 20 bp, synthetic construct
  misc_feature 1..20: note = chemically synthesized
  source 1..20: mol_type = other DNA
cccagctacccaggaggctg

SEQ ID NO: 53670 - DNA, 20 bp, synthetic construct
  misc_feature 1..20: note = chemically synthesized
  source 1..20: mol_type = other DNA
agctacccaggaggctgcgg

SEQ ID NO: 53671 - DNA, 20 bp, synthetic construct
  misc_feature 1..20: note = chemically synthesized
  source 1..20: mol_type = other DNA
gctacccaggaggctgcggc

SEQ ID NO: 53672 - DNA, 20 bp, synthetic construct
  misc_feature 1..20: note = chemically synthesized
  source 1..20: mol_type = other DNA
tacccaggaggctgcggcag

SEQ ID NO: 53673 - DNA, 20 bp, synthetic construct
  misc_feature 1..20: note = chemically synthesized
  source 1..20: mol_type = other DNA
gcaggagaatcacttcaacc

SEQ ID NO: 53674 - DNA, 20 bp, synthetic construct
  misc_feature 1..20: note = chemically synthesized
  source 1..20: mol_type = other DNA
caggagaatcacttcaaccc

SEQ ID NO: 53675 - DNA, 20 bp, synthetic construct
  misc_feature 1..20: note = chemically synthesized
  source 1..20: mol_type = other DNA
ggagaatcacttcaacccgg

SEQ ID NO: 53676 - DNA, 20 bp, synthetic construct
  misc_feature 1..20: note = chemically synthesized
  source 1..20: mol_type = other DNA
gagaatcacttcaacccggg

SEQ ID NO: 53677 - DNA, 20 bp, synthetic construct
  misc_feature 1..20: note = chemically synthesized
  source 1..20: mol_type = other DNA
aatcacttcaacccgggagg

SEQ ID NO: 53678 - DNA, 20 bp, synthetic construct
  misc_feature 1..20: note = chemically synthesized
  source 1..20: mol_type = other DNA
tcacttcaacccgggaggca

SEQ ID NO: 53679 - DNA, 20 bp, synthetic construct
  misc_feature 1..20: note = chemically synthesized
  source 1..20: mol_type = other DNA
cacttcaacccgggaggcag

SEQ ID NO: 53680 - DNA, 20 bp, synthetic construct
  misc_feature 1..20: note = chemically synthesized
  source 1..20: mol_type = other DNA
aacccgggaggcagaggttg

SEQ ID NO: 53681 - DNA, 20 bp, synthetic construct
  misc_feature 1..20: note = chemically synthesized
  source 1..20: mol_type = other DNA
cgggaggcagaggttgcagt

SEQ ID NO: 53682 - DNA, 20 bp, synthetic construct
  misc_feature 1..20: note = chemically synthesized
  source 1..20: mol_type = other DNA
gaaatcacaccactgcactc

SEQ ID NO: 53683 - DNA, 20 bp, synthetic construct
  misc_feature 1..20: note = chemically synthesized
  source 1..20: mol_type = other DNA
acaccactgcactccagcct

SEQ ID NO: 53684 - DNA, 20 bp, synthetic construct
  misc_feature 1..20: note = chemically synthesized
  source 1..20: mol_type = other DNA
ctgcactccagccttggtga

SEQ ID NO: 53685 - DNA, 20 bp, synthetic construct
  misc_feature 1..20: note = chemically synthesized
  source 1..20: mol_type = other DNA
gcactccagccttggtgaca

SEQ ID NO: 53686 - DNA, 20 bp, synthetic construct
  misc_feature 1..20: note = chemically synthesized
  source 1..20: mol_type = other DNA
tccagccttggtgacagaga

SEQ ID NO: 53687 - DNA, 20 bp, synthetic construct
  misc_feature 1..20: note = chemically synthesized
  source 1..20: mol_type = other DNA
gtgacagagaaagattctgt

SEQ ID NO: 53688 - DNA, 20 bp, synthetic construct
  misc_feature 1..20: note = chemically synthesized
  source 1..20: mol_type = other DNA
tgacagagaaagattctgtc

SEQ ID NO: 53689 - DNA, 20 bp, synthetic construct
  misc_feature 1..20: note = chemically synthesized
  source 1..20: mol_type = other DNA
ctgtcaggaaaaaaaaaaaa

SEQ ID NO: 53690 - DNA, 20 bp, synthetic construct
  misc_feature 1..20: note = chemically synthesized
  source 1..20: mol_type = other DNA
aaagtttaaatgaattaccc

SEQ ID NO: 53691 - DNA, 20 bp, synthetic construct
  misc_feature 1..20: note = chemically synthesized
  source 1..20: mol_type = other DNA
aagtttaaatgaattaccca

SEQ ID NO: 53692 - DNA, 20 bp, synthetic construct
  misc_feature 1..20: note = chemically synthesized
  source 1..20: mol_type = other DNA
tacccaaggtatataattgt

SEQ ID NO: 53693 - DNA, 20 bp, synthetic construct
  misc_feature 1..20: note = chemically synthesized
  source 1..20: mol_type = other DNA
aggtatataattgttagtgt

SEQ ID NO: 53694 - DNA, 20 bp, synthetic construct
  misc_feature 1..20: note = chemically synthesized
  source 1..20: mol_type = other DNA
tatataattgttagtgttag

SEQ ID NO: 53695 - DNA, 20 bp, synthetic construct
  misc_feature 1..20: note = chemically synthesized
  source 1..20: mol_type = other DNA
atataattgttagtgttaga

SEQ ID NO: 53696 - DNA, 20 bp, synthetic construct
  misc_feature 1..20: note = chemically synthesized
  source 1..20: mol_type = other DNA
taattgttagtgttagaagg

SEQ ID NO: 53697 - DNA, 20 bp, synthetic construct
  misc_feature 1..20: note = chemically synthesized
  source 1..20: mol_type = other DNA
ttgttagtgttagaaggaag

SEQ ID NO: 53698 - DNA, 20 bp, synthetic construct
  misc_feature 1..20: note = chemically synthesized
  source 1..20: mol_type = other DNA
ttagtgttagaaggaagaag

SEQ ID NO: 53699 - DNA, 20 bp, synthetic construct
  misc_feature 1..20: note = chemically synthesized
  source 1..20: mol_type = other DNA
tagtgttagaaggaagaaga

SEQ ID NO: 53700 - DNA, 20 bp, synthetic construct
  misc_feature 1..20: note = chemically synthesized
  source 1..20: mol_type = other DNA
agtgttagaaggaagaagaa

SEQ ID NO: 53701 - DNA, 20 bp, synthetic construct
  misc_feature 1..20: note = chemically synthesized
  source 1..20: mol_type = other DNA
tgttagaaggaagaagaagg

SEQ ID NO: 53702 - DNA, 20 bp, synthetic construct
  misc_feature 1..20: note = chemically synthesized
  source 1..20: mol_type = other DNA
gttagaaggaagaagaaggg

SEQ ID NO: 53703 - DNA, 20 bp, synthetic construct
  misc_feature 1..20: note = chemically synthesized
  source 1..20: mol_type = other DNA
ttagaaggaagaagaaggga

SEQ ID NO: 53704 - DNA, 20 bp, synthetic construct
  misc_feature 1..20: note = chemically synthesized
  source 1..20: mol_type = other DNA
agaaggaagaagaagggagg

SEQ ID NO: 53705 - DNA, 20 bp, synthetic construct
  misc_feature 1..20: note = chemically synthesized
  source 1..20: mol_type = other DNA
gaaggaagaagaagggaggg

SEQ ID NO: 53706 - DNA, 20 bp, synthetic construct
  misc_feature 1..20: note = chemically synthesized
  source 1..20: mol_type = other DNA
ggaagaagaagggagggagg

SEQ ID NO: 53707 - DNA, 20 bp, synthetic construct
  misc_feature 1..20: note = chemically synthesized
  source 1..20: mol_type = other DNA
gaagaagaagggagggagga

SEQ ID NO: 53708 - DNA, 20 bp, synthetic construct
  misc_feature 1..20: note = chemically synthesized
  source 1..20: mol_type = other DNA
gaagaagggagggaggaagg

SEQ ID NO: 53709 - DNA, 20 bp, synthetic construct
  misc_feature 1..20: note = chemically synthesized
  source 1..20: mol_type = other DNA
aagaagggagggaggaagga

SEQ ID NO: 53710 - DNA, 20 bp, synthetic construct
  misc_feature 1..20: note = chemically synthesized
  source 1..20: mol_type = other DNA
agaagggagggaggaaggaa

SEQ ID NO: 53711 - DNA, 20 bp, synthetic construct
  misc_feature 1..20: note = chemically synthesized
  source 1..20: mol_type = other DNA
aagggagggaggaaggaagg

SEQ ID NO: 53712 - DNA, 20 bp, synthetic construct
  misc_feature 1..20: note = chemically synthesized
  source 1..20: mol_type = other DNA
gagggaggaaggaagggaga

SEQ ID NO: 53713 - DNA, 20 bp, synthetic construct
  misc_feature 1..20: note = chemically synthesized
  source 1..20: mol_type = other DNA
gaggaaggaagggagaaaga

SEQ ID NO: 53714 - DNA, 20 bp, synthetic construct
  misc_feature 1..20: note = chemically synthesized
  source 1..20: mol_type = other DNA
aggaaggaagggagaaagaa

SEQ ID NO: 53715 - DNA, 20 bp, synthetic construct
  misc_feature 1..20: note = chemically synthesized
  source 1..20: mol_type = other DNA
ggaaggaagggagaaagaaa

SEQ ID NO: 53716 - DNA, 20 bp, synthetic construct
  misc_feature 1..20: note = chemically synthesized
  source 1..20: mol_type = other DNA
aggaagggagaaagaaaggg

SEQ ID NO: 53717 - DNA, 20 bp, synthetic construct
  misc_feature 1..20: note = chemically synthesized
  source 1..20: mol_type = other DNA
ggaagggagaaagaaaggga

SEQ ID NO: 53718 - DNA, 20 bp, synthetic construct
  misc_feature 1..20: note = chemically synthesized
  source 1..20: mol_type = other DNA
aagggagaaagaaagggaag

SEQ ID NO: 53719 - DNA, 20 bp, synthetic construct
  misc_feature 1..20: note = chemically synthesized
  source 1..20: mol_type = other DNA
agggagaaagaaagggaagg

SEQ ID NO: 53720 - DNA, 20 bp, synthetic construct
  misc_feature 1..20: note = chemically synthesized
  source 1..20: mol_type = other DNA
gagaaagaaagggaaggagg

SEQ ID NO: 53721 - DNA, 20 bp, synthetic construct
  misc_feature 1..20: note = chemically synthesized
  source 1..20: mol_type = other DNA
agaaagaaagggaaggagga

SEQ ID NO: 53722 - DNA, 20 bp, synthetic construct
  misc_feature 1..20: note = chemically synthesized
  source 1..20: mol_type = other DNA
gaaagaaagggaaggaggaa

SEQ ID NO: 53723 - DNA, 20 bp, synthetic construct
  misc_feature 1..20: note = chemically synthesized
  source 1..20: mol_type = other DNA
aagaaagggaaggaggaagg

SEQ ID NO: 53724 - DNA, 20 bp, synthetic construct
  misc_feature 1..20: note = chemically synthesized
  source 1..20: mol_type = other DNA
agaaagggaaggaggaaggg

SEQ ID NO: 53725 - DNA, 20 bp, synthetic construct
  misc_feature 1..20: note = chemically synthesized
  source 1..20: mol_type = other DNA
gaaagggaaggaggaaggga

SEQ ID NO: 53726 - DNA, 20 bp, synthetic construct
  misc_feature 1..20: note = chemically synthesized
  source 1..20: mol_type = other DNA
aagggaaggaggaagggagg

SEQ ID NO: 53727 - DNA, 20 bp, synthetic construct
  misc_feature 1..20: note = chemically synthesized
  source 1..20: mol_type = other DNA
agggaaggaggaagggaggg

SEQ ID NO: 53728 - DNA, 20 bp, synthetic construct
  misc_feature 1..20: note = chemically synthesized
  source 1..20: mol_type = other DNA
gggaaggaggaagggaggga

SEQ ID NO: 53729 - DNA, 20 bp, synthetic construct
  misc_feature 1..20: note = chemically synthesized
  source 1..20: mol_type = other DNA
aaggaggaagggagggaggg

SEQ ID NO: 53730 - DNA, 20 bp, synthetic construct
  misc_feature 1..20: note = chemically synthesized
  source 1..20: mol_type = other DNA
aggaagggagggagggaaga

SEQ ID NO: 53731 - DNA, 20 bp, synthetic construct
  misc_feature 1..20: note = chemically synthesized
  source 1..20: mol_type = other DNA
agaaagcctttatttatcta

SEQ ID NO: 53732 - DNA, 20 bp, synthetic construct
  misc_feature 1..20: note = chemically synthesized
  source 1..20: mol_type = other DNA
gaaagcctttatttatctat

SEQ ID NO: 53733 - DNA, 20 bp, synthetic construct
  misc_feature 1..20: note = chemically synthesized
  source 1..20: mol_type = other DNA
aaagcctttatttatctatg

SEQ ID NO: 53734 - DNA, 20 bp, synthetic construct
  misc_feature 1..20: note = chemically synthesized
  source 1..20: mol_type = other DNA
tatttatctatggggttccc

SEQ ID NO: 53735 - DNA, 20 bp, synthetic construct
  misc_feature 1..20: note = chemically synthesized
  source 1..20: mol_type = other DNA
tatctatggggttccctgga

SEQ ID NO: 53736 - DNA, 20 bp, synthetic construct
  misc_feature 1..20: note = chemically synthesized
  source 1..20: mol_type = other DNA
ctatggggttccctggaaag

SEQ ID NO: 53737 - DNA, 20 bp, synthetic construct
  misc_feature 1..20: note = chemically synthesized
  source 1..20: mol_type = other DNA
tatggggttccctggaaagc

SEQ ID NO: 53738 - DNA, 20 bp, synthetic construct
  misc_feature 1..20: note = chemically synthesized
  source 1..20: mol_type = other DNA
ccctggaaagcaggctgaaa

SEQ ID NO: 53739 - DNA, 20 bp, synthetic construct
  misc_feature 1..20: note = chemically synthesized
  source 1..20: mol_type = other DNA
ctggaaagcaggctgaaatg

SEQ ID NO: 53740 - DNA, 20 bp, synthetic construct
  misc_feature 1..20: note = chemically synthesized
  source 1..20: mol_type = other DNA
ctgaaatggagattcacgtg

SEQ ID NO: 53741 - DNA, 20 bp, synthetic construct
  misc_feature 1..20: note = chemically synthesized
  source 1..20: mol_type = other DNA
tgaaatggagattcacgtgc

SEQ ID NO: 53742 - DNA, 20 bp, synthetic construct
  misc_feature 1..20: note = chemically synthesized
  source 1..20: mol_type = other DNA
aaatggagattcacgtgcag

SEQ ID NO: 53743 - DNA, 20 bp, synthetic construct
  misc_feature 1..20: note = chemically synthesized
  source 1..20: mol_type = other DNA
gagattcacgtgcaggagtt

SEQ ID NO: 53744 - DNA, 20 bp, synthetic construct
  misc_feature 1..20: note = chemically synthesized
  source 1..20: mol_type = other DNA
gtgcaggagtttagatactc

SEQ ID NO: 53745 - DNA, 20 bp, synthetic construct
  misc_feature 1..20: note = chemically synthesized
  source 1..20: mol_type = other DNA
tgcaggagtttagatactct

SEQ ID NO: 53746 - DNA, 20 bp, synthetic construct
  misc_feature 1..20: note = chemically synthesized
  source 1..20: mol_type = other DNA
gcaggagtttagatactctg

SEQ ID NO: 53747 - DNA, 20 bp, synthetic construct
  misc_feature 1..20: note = chemically synthesized
  source 1..20: mol_type = other DNA
actctggggaactatacttg

SEQ ID NO: 53748 - DNA, 20 bp, synthetic construct
  misc_feature 1..20: note = chemically synthesized
  source 1..20: mol_type = other DNA
ctggggaactatacttgtag

SEQ ID NO: 53749 - DNA, 20 bp, synthetic construct
  misc_feature 1..20: note = chemically synthesized
  source 1..20: mol_type = other DNA
tggggaactatacttgtaga

SEQ ID NO: 53750 - DNA, 20 bp, synthetic construct
  misc_feature 1..20: note = chemically synthesized
  source 1..20: mol_type = other DNA
ggggaactatacttgtagaa

SEQ ID NO: 53751 - DNA, 20 bp, synthetic construct
  misc_feature 1..20: note = chemically synthesized
  source 1..20: mol_type = other DNA
gaactatacttgtagaaggg

SEQ ID NO: 53752 - DNA, 20 bp, synthetic construct
  misc_feature 1..20: note = chemically synthesized
  source 1..20: mol_type = other DNA
aactatacttgtagaaggga

SEQ ID NO: 53753 - DNA, 20 bp, synthetic construct
  misc_feature 1..20: note = chemically synthesized
  source 1..20: mol_type = other DNA
tacttgtagaagggaaggaa

SEQ ID NO: 53754 - DNA, 20 bp, synthetic construct
  misc_feature 1..20: note = chemically synthesized
  source 1..20: mol_type = other DNA
acttgtagaagggaaggaac

SEQ ID NO: 53755 - DNA, 20 bp, synthetic construct
  misc_feature 1..20: note = chemically synthesized
  source 1..20: mol_type = other DNA
tagaagggaaggaacaggaa

SEQ ID NO: 53756 - DNA, 20 bp, synthetic construct
  misc_feature 1..20: note = chemically synthesized
  source 1..20: mol_type = other DNA
agaagggaaggaacaggaac

SEQ ID NO: 53757 - DNA, 20 bp, synthetic construct
  misc_feature 1..20: note = chemically synthesized
  source 1..20: mol_type = other DNA
gaagggaaggaacaggaaca

SEQ ID NO: 53758 - DNA, 20 bp, synthetic construct
  misc_feature 1..20: note = chemically synthesized
  source 1..20: mol_type = other DNA
gggaaggaacaggaacaggg

SEQ ID NO: 53759 - DNA, 20 bp, synthetic construct
  misc_feature 1..20: note = chemically synthesized
  source 1..20: mol_type = other DNA
aaggaacaggaacagggcag

SEQ ID NO: 53760 - DNA, 20 bp, synthetic construct
  misc_feature 1..20: note = chemically synthesized
  source 1..20: mol_type = other DNA
aggaacaggaacagggcaga

SEQ ID NO: 53761 - DNA, 20 bp, synthetic construct
  misc_feature 1..20: note = chemically synthesized
  source 1..20: mol_type = other DNA
gaacaggaacagggcagaag

SEQ ID NO: 53762 - DNA, 20 bp, synthetic construct
  misc_feature 1..20: note = chemically synthesized
  source 1..20: mol_type = other DNA
acaggaacagggcagaagga

SEQ ID NO: 53763 - DNA, 20 bp, synthetic construct
  misc_feature 1..20: note = chemically synthesized
  source 1..20: mol_type = other DNA
caggaacagggcagaaggag

SEQ ID NO: 53764 - DNA, 20 bp, synthetic construct
  misc_feature 1..20: note = chemically synthesized
  source 1..20: mol_type = other DNA
acagggcagaaggagaggtc

SEQ ID NO: 53765 - DNA, 20 bp, synthetic construct
  misc_feature 1..20: note = chemically synthesized
  source 1..20: mol_type = other DNA
ttctgcctcatccaacccca

SEQ ID NO: 53766 - DNA, 20 bp, synthetic construct
  misc_feature 1..20: note = chemically synthesized
  source 1..20: mol_type = other DNA
gcctcatccaaccccacagc

SEQ ID NO: 53767 - DNA, 20 bp, synthetic construct
  misc_feature 1..20: note = chemically synthesized
  source 1..20: mol_type = other DNA
caaccccacagcgagctctg

SEQ ID NO: 53768 - DNA, 20 bp, synthetic construct
  misc_feature 1..20: note = chemically synthesized
  source 1..20: mol_type = other DNA
cccacagcgagctctgaagc

SEQ ID NO: 53769 - DNA, 20 bp, synthetic construct
  misc_feature 1..20: note = chemically synthesized
  source 1..20: mol_type = other DNA
ccacagcgagctctgaagct

SEQ ID NO: 53770 - DNA, 20 bp, synthetic construct
  misc_feature 1..20: note = chemically synthesized
  source 1..20: mol_type = other DNA
cacagcgagctctgaagctg

SEQ ID NO: 53771 - DNA, 20 bp, synthetic construct
  misc_feature 1..20: note = chemically synthesized
  source 1..20: mol_type = other DNA
gcgagctctgaagctgggga

SEQ ID NO: 53772 - DNA, 20 bp, synthetic construct
  misc_feature 1..20: note = chemically synthesized
  source 1..20: mol_type = other DNA
tgaagctggggatggctcct

SEQ ID NO: 53773 - DNA, 20 bp, synthetic construct
  misc_feature 1..20: note = chemically synthesized
  source 1..20: mol_type = other DNA
aagctggggatggctcctca

SEQ ID NO: 53774 - DNA, 20 bp, synthetic construct
  misc_feature 1..20: note = chemically synthesized
  source 1..20: mol_type = other DNA
tggggatggctcctcagagt

SEQ ID NO: 53775 - DNA, 20 bp, synthetic construct
  misc_feature 1..20: note = chemically synthesized
  source 1..20: mol_type = other DNA
tggctcctcagagttggtcc

SEQ ID NO: 53776 - DNA, 20 bp, synthetic construct
  misc_feature 1..20: note = chemically synthesized
  source 1..20: mol_type = other DNA
tcctcagagttggtccaagt

SEQ ID NO: 53777 - DNA, 20 bp, synthetic construct
  misc_feature 1..20: note = chemically synthesized
  source 1..20: mol_type = other DNA
cctcagagttggtccaagtt

SEQ ID NO: 53778 - DNA, 20 bp, synthetic construct
  misc_feature 1..20: note = chemically synthesized
  source 1..20: mol_type = other DNA
gagttggtccaagttgggac

SEQ ID NO: 53779 - DNA, 20 bp, synthetic construct
  misc_feature 1..20: note = chemically synthesized
  source 1..20: mol_type = other DNA
agttggtccaagttgggaca

SEQ ID NO: 53780 - DNA, 20 bp, synthetic construct
  misc_feature 1..20: note = chemically synthesized
  source 1..20: mol_type = other DNA
gttggtccaagttgggacaa

SEQ ID NO: 53781 - DNA, 20 bp, synthetic construct
  misc_feature 1..20: note = chemically synthesized
  source 1..20: mol_type = other DNA
ccaagttgggacaagggaat

SEQ ID NO: 53782 - DNA, 20 bp, synthetic construct
  misc_feature 1..20: note = chemically synthesized
  source 1..20: mol_type = other DNA
gggacaagggaatcagaccc

SEQ ID NO: 53783 - DNA, 20 bp, synthetic construct
  misc_feature 1..20: note = chemically synthesized
  source 1..20: mol_type = other DNA
ggacaagggaatcagaccct

SEQ ID NO: 53784 - DNA, 20 bp, synthetic construct
  misc_feature 1..20: note = chemically synthesized
  source 1..20: mol_type = other DNA
gacaagggaatcagaccctg

SEQ ID NO: 53785 - DNA, 20 bp, synthetic construct
  misc_feature 1..20: note = chemically synthesized
  source 1..20: mol_type = other DNA
caagggaatcagaccctggg

SEQ ID NO: 53786 - DNA, 20 bp, synthetic construct
  misc_feature 1..20: note = chemically synthesized
  source 1..20: mol_type = other DNA
agggaatcagaccctgggga

SEQ ID NO: 53787 - DNA, 20 bp, synthetic construct
  misc_feature 1..20: note = chemically synthesized
  source 1..20: mol_type = other DNA
gggagagcgtaaccttgatc

SEQ ID NO: 53788 - DNA, 20 bp, synthetic construct
  misc_feature 1..20: note = chemically synthesized
  source 1..20: mol_type = other DNA
ggagagcgtaaccttgatca

SEQ ID NO: 53789 - DNA, 20 bp, synthetic construct
  misc_feature 1..20: note = chemically synthesized
  source 1..20: mol_type = other DNA
ttgatcaaggcgactctctt

SEQ ID NO: 53790 - DNA, 20 bp, synthetic construct
  misc_feature 1..20: note = chemically synthesized
  source 1..20: mol_type = other DNA
caaggcgactctctttagcc

SEQ ID NO: 53791 - DNA, 20 bp, synthetic construct
  misc_feature 1..20: note = chemically synthesized
  source 1..20: mol_type = other DNA
aaggcgactctctttagccc

SEQ ID NO: 53792 - DNA, 20 bp, synthetic construct
  misc_feature 1..20: note = chemically synthesized
  source 1..20: mol_type = other DNA
aggcgactctctttagccca

SEQ ID NO: 53793 - DNA, 20 bp, synthetic construct
  misc_feature 1..20: note = chemically synthesized
  source 1..20: mol_type = other DNA
tctttagcccagggcaatgc

SEQ ID NO: 53794 - DNA, 20 bp, synthetic construct
  misc_feature 1..20: note = chemically synthesized
  source 1..20: mol_type = other DNA
ctttagcccagggcaatgcc

SEQ ID NO: 53795 - DNA, 20 bp, synthetic construct
  misc_feature 1..20: note = chemically synthesized
  source 1..20: mol_type = other DNA
ttagcccagggcaatgccag

SEQ ID NO: 53796 - DNA, 20 bp, synthetic construct
  misc_feature 1..20: note = chemically synthesized
  source 1..20: mol_type = other DNA
gcccagggcaatgccaggag

SEQ ID NO: 53797 - DNA, 20 bp, synthetic construct
  misc_feature 1..20: note = chemically synthesized
  source 1..20: mol_type = other DNA
cccagggcaatgccaggaga

SEQ ID NO: 53798 - DNA, 20 bp, synthetic construct
  misc_feature 1..20: note = chemically synthesized
  source 1..20: mol_type = other DNA
ggcaatgccaggagaaggct

SEQ ID NO: 53799 - DNA, 20 bp, synthetic construct
  misc_feature 1..20: note = chemically synthesized
  source 1..20: mol_type = other DNA
caatgccaggagaaggctga

SEQ ID NO: 53800 - DNA, 20 bp, synthetic construct
  misc_feature 1..20: note = chemically synthesized
  source 1..20: mol_type = other DNA
tgccaggagaaggctgagag

SEQ ID NO: 53801 - DNA, 20 bp, synthetic construct
  misc_feature 1..20: note = chemically synthesized
  source 1..20: mol_type = other DNA
aggagaaggctgagagcaga

SEQ ID NO: 53802 - DNA, 20 bp, synthetic construct
  misc_feature 1..20: note = chemically synthesized
  source 1..20: mol_type = other DNA
atctaccatcacactctcaa

SEQ ID NO: 53803 - DNA, 20 bp, synthetic construct
  misc_feature 1..20: note = chemically synthesized
  source 1..20: mol_type = other DNA
actctcaacagctacgaaat

SEQ ID NO: 53804 - DNA, 20 bp, synthetic construct
  misc_feature 1..20: note = chemically synthesized
  source 1..20: mol_type = other DNA
cagctacgaaataagtcctg

SEQ ID NO: 53805 - DNA, 20 bp, synthetic construct
  misc_feature 1..20: note = chemically synthesized
  source 1..20: mol_type = other DNA
acgaaataagtcctgcagtt

SEQ ID NO: 53806 - DNA, 20 bp, synthetic construct
  misc_feature 1..20: note = chemically synthesized
  source 1..20: mol_type = other DNA
cgaaataagtcctgcagttc

SEQ ID NO: 53807 - DNA, 20 bp, synthetic construct
  misc_feature 1..20: note = chemically synthesized
  source 1..20: mol_type = other DNA
aaataagtcctgcagttcag

SEQ ID NO: 53808 - DNA, 20 bp, synthetic construct
  misc_feature 1..20: note = chemically synthesized
  source 1..20: mol_type = other DNA
aataagtcctgcagttcagg

SEQ ID NO: 53809 - DNA, 20 bp, synthetic construct
  misc_feature 1..20: note = chemically synthesized
  source 1..20: mol_type = other DNA
ataagtcctgcagttcagga

SEQ ID NO: 53810 - DNA, 20 bp, synthetic construct
  misc_feature 1..20: note = chemically synthesized
  source 1..20: mol_type = other DNA
aagtcctgcagttcaggagg

SEQ ID NO: 53811 - DNA, 20 bp, synthetic construct
  misc_feature 1..20: note = chemically synthesized
  source 1..20: mol_type = other DNA
agtcctgcagttcaggaggg

SEQ ID NO: 53812 - DNA, 20 bp, synthetic construct
  misc_feature 1..20: note = chemically synthesized
  source 1..20: mol_type = other DNA
tgcagttcaggagggaggtc

SEQ ID NO: 53813 - DNA, 20 bp, synthetic construct
  misc_feature 1..20: note = chemically synthesized
  source 1..20: mol_type = other DNA
gcagttcaggagggaggtct

SEQ ID NO: 53814 - DNA, 20 bp, synthetic construct
  misc_feature 1..20: note = chemically synthesized
  source 1..20: mol_type = other DNA
gttcaggagggaggtctggg

SEQ ID NO: 53815 - DNA, 20 bp, synthetic construct
  misc_feature 1..20: note = chemically synthesized
  source 1..20: mol_type = other DNA
gaggtctgggcggcacatct

SEQ ID NO: 53816 - DNA, 20 bp, synthetic construct
  misc_feature 1..20: note = chemically synthesized
  source 1..20: mol_type = other DNA
aggtctgggcggcacatctc

SEQ ID NO: 53817 - DNA, 20 bp, synthetic construct
  misc_feature 1..20: note = chemically synthesized
  source 1..20: mol_type = other DNA
tctcaggaccctctatctct

SEQ ID NO: 53818 - DNA, 20 bp, synthetic construct
  misc_feature 1..20: note = chemically synthesized
  source 1..20: mol_type = other DNA
ctcaggaccctctatctctc

SEQ ID NO: 53819 - DNA, 20 bp, synthetic construct
  misc_feature 1..20: note = chemically synthesized
  source 1..20: mol_type = other DNA
tcaggaccctctatctctca

SEQ ID NO: 53820 - DNA, 20 bp, synthetic construct
  misc_feature 1..20: note = chemically synthesized
  source 1..20: mol_type = other DNA
ggaccctctatctctcaggg

SEQ ID NO: 53821 - DNA, 20 bp, synthetic construct
  misc_feature 1..20: note = chemically synthesized
  source 1..20: mol_type = other DNA
accctctatctctcagggta

SEQ ID NO: 53822 - DNA, 20 bp, synthetic construct
  misc_feature 1..20: note = chemically synthesized
  source 1..20: mol_type = other DNA
ccctctatctctcagggtag

SEQ ID NO: 53823 - DNA, 20 bp, synthetic construct
  misc_feature 1..20: note = chemically synthesized
  source 1..20: mol_type = other DNA
tctctcagggtagaggaatt

SEQ ID NO: 53824 - DNA, 20 bp, synthetic construct
  misc_feature 1..20: note = chemically synthesized
  source 1..20: mol_type = other DNA
cagggtagaggaattaagaa

SEQ ID NO: 53825 - DNA, 20 bp, synthetic construct
  misc_feature 1..20: note = chemically synthesized
  source 1..20: mol_type = other DNA
agggtagaggaattaagaat

SEQ ID NO: 53826 - DNA, 20 bp, synthetic construct
  misc_feature 1..20: note = chemically synthesized
  source 1..20: mol_type = other DNA
tagaggaattaagaatggga

SEQ ID NO: 53827 - DNA, 20 bp, synthetic construct
  misc_feature 1..20: note = chemically synthesized
  source 1..20: mol_type = other DNA
agaggaattaagaatgggat

SEQ ID NO: 53828 - DNA, 20 bp, synthetic construct
  misc_feature 1..20: note = chemically synthesized
  source 1..20: mol_type = other DNA
attaagaatgggatgggaac

SEQ ID NO: 53829 - DNA, 20 bp, synthetic construct
  misc_feature 1..20: note = chemically synthesized
  source 1..20: mol_type = other DNA
agaatgggatgggaaccaga

SEQ ID NO: 53830 - DNA, 20 bp, synthetic construct
  misc_feature 1..20: note = chemically synthesized
  source 1..20: mol_type = other DNA
gaatgggatgggaaccagac

SEQ ID NO: 53831 - DNA, 20 bp, synthetic construct
  misc_feature 1..20: note = chemically synthesized
  source 1..20: mol_type = other DNA
gatgggaaccagacgggcca

SEQ ID NO: 53832 - DNA, 20 bp, synthetic construct
  misc_feature 1..20: note = chemically synthesized
  source 1..20: mol_type = other DNA
gggaaccagacgggccatgg

SEQ ID NO: 53833 - DNA, 20 bp, synthetic construct
  misc_feature 1..20: note = chemically synthesized
  source 1..20: mol_type = other DNA
cacctataatcccaacactt

SEQ ID NO: 53834 - DNA, 20 bp, synthetic construct
  misc_feature 1..20: note = chemically synthesized
  source 1..20: mol_type = other DNA
acctataatcccaacacttt

SEQ ID NO: 53835 - DNA, 20 bp, synthetic construct
  misc_feature 1..20: note = chemically synthesized
  source 1..20: mol_type = other DNA
ctataatcccaacactttgg

SEQ ID NO: 53836 - DNA, 20 bp, synthetic construct
  misc_feature 1..20: note = chemically synthesized
  source 1..20: mol_type = other DNA
tataatcccaacactttggg

SEQ ID NO: 53837 - DNA, 20 bp, synthetic construct
  misc_feature 1..20: note = chemically synthesized
  source 1..20: mol_type = other DNA
tcccaacactttgggaggcc

SEQ ID NO: 53838 - DNA, 20 bp, synthetic construct
  misc_feature 1..20: note = chemically synthesized
  source 1..20: mol_type = other DNA
cccaacactttgggaggcca

SEQ ID NO: 53839 - DNA, 20 bp, synthetic construct
  misc_feature 1..20: note = chemically synthesized
  source 1..20: mol_type = other DNA
ccaacactttgggaggccaa

SEQ ID NO: 53840 - DNA, 20 bp, synthetic construct
  misc_feature 1..20: note = chemically synthesized
  source 1..20: mol_type = other DNA
acactttgggaggccaaggg

SEQ ID NO: 53841 - DNA, 20 bp, synthetic construct
  misc_feature 1..20: note = chemically synthesized
  source 1..20: mol_type = other DNA
cactttgggaggccaagggt

SEQ ID NO: 53842 - DNA, 20 bp, synthetic construct
  misc_feature 1..20: note = chemically synthesized
  source 1..20: mol_type = other DNA
ctttgggaggccaagggtag

SEQ ID NO: 53843 - DNA, 20 bp, synthetic construct
  misc_feature 1..20: note = chemically synthesized
  source 1..20: mol_type = other DNA
tttgggaggccaagggtagg

SEQ ID NO: 53844 - DNA, 20 bp, synthetic construct
  misc_feature 1..20: note = chemically synthesized
  source 1..20: mol_type = other DNA
caagggtaggaggattgctt

SEQ ID NO: 53845 - DNA, 20 bp, synthetic construct
  misc_feature 1..20: note = chemically synthesized
  source 1..20: mol_type = other DNA
taggaggattgcttgagccc

SEQ ID NO: 53846 - DNA, 20 bp, synthetic construct
  misc_feature 1..20: note = chemically synthesized
  source 1..20: mol_type = other DNA
ggaggattgcttgagcccaa

SEQ ID NO: 53847 - DNA, 20 bp, synthetic construct
  misc_feature 1..20: note = chemically synthesized
  source 1..20: mol_type = other DNA
tgagcccaagagttcaaaac

SEQ ID NO: 53848 - DNA, 20 bp, synthetic construct
  misc_feature 1..20: note = chemically synthesized
  source 1..20: mol_type = other DNA
ccaagagttcaaaaccagcc

SEQ ID NO: 53849 - DNA, 20 bp, synthetic construct
  misc_feature 1..20: note = chemically synthesized
  source 1..20: mol_type = other DNA
caagagttcaaaaccagcct

SEQ ID NO: 53850 - DNA, 20 bp, synthetic construct
  misc_feature 1..20: note = chemically synthesized
  source 1..20: mol_type = other DNA
tttaaaaaatttgctgtgtg

SEQ ID NO: 53851 - DNA, 20 bp, synthetic construct
  misc_feature 1..20: note = chemically synthesized
  source 1..20: mol_type = other DNA
aaaaaatttgctgtgtgtgg

SEQ ID NO: 53852 - DNA, 20 bp, synthetic construct
  misc_feature 1..20: note = chemically synthesized
  source 1..20: mol_type = other DNA
tgtgtggtggtgtgcacctg

SEQ ID NO: 53853 - DNA, 20 bp, synthetic construct
  misc_feature 1..20: note = chemically synthesized
  source 1..20: mol_type = other DNA
gtggtgtgcacctgtggtcc

SEQ ID NO: 53854 - DNA, 20 bp, synthetic construct
  misc_feature 1..20: note = chemically synthesized
  source 1..20: mol_type = other DNA
cacctgtggtcccagctact

SEQ ID NO: 53855 - DNA, 20 bp, synthetic construct
  misc_feature 1..20: note = chemically synthesized
  source 1..20: mol_type = other DNA
acctgtggtcccagctactc

SEQ ID NO: 53856 - DNA, 20 bp, synthetic construct
  misc_feature 1..20: note = chemically synthesized
  source 1..20: mol_type = other DNA
cctgtggtcccagctactca

SEQ ID NO: 53857 - DNA, 20 bp, synthetic construct
  misc_feature 1..20: note = chemically synthesized
  source 1..20: mol_type = other DNA
ctgtggtcccagctactcag

SEQ ID NO: 53858 - DNA, 20 bp, synthetic construct
  misc_feature 1..20: note = chemically synthesized
  source 1..20: mol_type = other DNA
tgtggtcccagctactcagg

SEQ ID NO: 53859 - DNA, 20 bp, synthetic construct
  misc_feature 1..20: note = chemically synthesized
  source 1..20: mol_type = other DNA
tcccagctactcagggggct

SEQ ID NO: 53860 - DNA, 20 bp, synthetic construct
  misc_feature 1..20: note = chemically synthesized
  source 1..20: mol_type = other DNA
cccagctactcagggggctg

SEQ ID NO: 53861 - DNA, 20 bp, synthetic construct
  misc_feature 1..20: note = chemically synthesized
  source 1..20: mol_type = other DNA
agctactcagggggctgagg

SEQ ID NO: 53862 - DNA, 20 bp, synthetic construct
  misc_feature 1..20: note = chemically synthesized
  source 1..20: mol_type = other DNA
gctactcagggggctgaggt

SEQ ID NO: 53863 - DNA, 20 bp, synthetic construct
  misc_feature 1..20: note = chemically synthesized
  source 1..20: mol_type = other DNA
tactcagggggctgaggtgg

SEQ ID NO: 53864 - DNA, 20 bp, synthetic construct
  misc_feature 1..20: note = chemically synthesized
  source 1..20: mol_type = other DNA
actcagggggctgaggtggg

SEQ ID NO: 53865 - DNA, 20 bp, synthetic construct
  misc_feature 1..20: note = chemically synthesized
  source 1..20: mol_type = other DNA
ctgaggtgggaggattgctt

SEQ ID NO: 53866 - DNA, 20 bp, synthetic construct
  misc_feature 1..20: note = chemically synthesized
  source 1..20: mol_type = other DNA
gtgggaggattgcttgagtc

SEQ ID NO: 53867 - DNA, 20 bp, synthetic construct
  misc_feature 1..20: note = chemically synthesized
  source 1..20: mol_type = other DNA
tgggaggattgcttgagtcc

SEQ ID NO: 53868 - DNA, 20 bp, synthetic construct
  misc_feature 1..20: note = chemically synthesized
  source 1..20: mol_type = other DNA
ggaggattgcttgagtccag

SEQ ID NO: 53869 - DNA, 20 bp, synthetic construct
  misc_feature 1..20: note = chemically synthesized
  source 1..20: mol_type = other DNA
gaggattgcttgagtccagg

SEQ ID NO: 53870 - DNA, 20 bp, synthetic construct
  misc_feature 1..20: note = chemically synthesized
  source 1..20: mol_type = other DNA
ttgcttgagtccaggaggtc

SEQ ID NO: 53871 - DNA, 20 bp, synthetic construct
  misc_feature 1..20: note = chemically synthesized
  source 1..20: mol_type = other DNA
tgcttgagtccaggaggtcg

SEQ ID NO: 53872 - DNA, 20 bp, synthetic construct
  misc_feature 1..20: note = chemically synthesized
  source 1..20: mol_type = other DNA
agtccaggaggtcgaggctg

SEQ ID NO: 53873 - DNA, 20 bp, synthetic construct
  misc_feature 1..20: note = chemically synthesized
  source 1..20: mol_type = other DNA
caggaggtcgaggctgcagt

SEQ ID NO: 53874 - DNA, 20 bp, synthetic construct
  misc_feature 1..20: note = chemically synthesized
  source 1..20: mol_type = other DNA
gctgcagtgagctatgatca

SEQ ID NO: 53875 - DNA, 20 bp, synthetic construct
  misc_feature 1..20: note = chemically synthesized
  source 1..20: mol_type = other DNA
atgatcatggcactgcattg

SEQ ID NO: 53876 - DNA, 20 bp, synthetic construct
  misc_feature 1..20: note = chemically synthesized
  source 1..20: mol_type = other DNA
catggcactgcattgcagcc

SEQ ID NO: 53877 - DNA, 20 bp, synthetic construct
  misc_feature 1..20: note = chemically synthesized
  source 1..20: mol_type = other DNA
atggcactgcattgcagcct

SEQ ID NO: 53878 - DNA, 20 bp, synthetic construct
  misc_feature 1..20: note = chemically synthesized
  source 1..20: mol_type = other DNA
ggcactgcattgcagcctag

SEQ ID NO: 53879 - DNA, 20 bp, synthetic construct
  misc_feature 1..20: note = chemically synthesized
  source 1..20: mol_type = other DNA
gcattgcagcctaggagaca

SEQ ID NO: 53880 - DNA, 20 bp, synthetic construct
  misc_feature 1..20: note = chemically synthesized
  source 1..20: mol_type = other DNA
tgcagcctaggagacaaagc

SEQ ID NO: 53881 - DNA, 20 bp, synthetic construct
  misc_feature 1..20: note = chemically synthesized
  source 1..20: mol_type = other DNA
aaaacaaacaaataaaaaaa

SEQ ID NO: 53882 - DNA, 20 bp, synthetic construct
  misc_feature 1..20: note = chemically synthesized
  source 1..20: mol_type = other DNA
aacaaataaaaaaacggaac

SEQ ID NO: 53883 - DNA, 20 bp, synthetic construct
  misc_feature 1..20: note = chemically synthesized
  source 1..20: mol_type = other DNA
aaaaaaacggaaccggttgc

SEQ ID NO: 53884 - DNA, 20 bp, synthetic construct
  misc_feature 1..20: note = chemically synthesized
  source 1..20: mol_type = other DNA
aaaacggaaccggttgcaag

SEQ ID NO: 53885 - DNA, 20 bp, synthetic construct
  misc_feature 1..20: note = chemically synthesized
  source 1..20: mol_type = other DNA
aaacggaaccggttgcaagc

SEQ ID NO: 53886 - DNA, 20 bp, synthetic construct
  misc_feature 1..20: note = chemically synthesized
  source 1..20: mol_type = other DNA
aacggaaccggttgcaagca

SEQ ID NO: 53887 - DNA, 20 bp, synthetic construct
  misc_feature 1..20: note = chemically synthesized
  source 1..20: mol_type = other DNA
cggttgcaagcagggttaaa

SEQ ID NO: 53888 - DNA, 20 bp, synthetic construct
  misc_feature 1..20: note = chemically synthesized
  source 1..20: mol_type = other DNA
gcaagcagggttaaatagcg

SEQ ID NO: 53889 - DNA, 20 bp, synthetic construct
  misc_feature 1..20: note = chemically synthesized
  source 1..20: mol_type = other DNA
gcagggttaaatagcgtggt

SEQ ID NO: 53890 - DNA, 20 bp, synthetic construct
  misc_feature 1..20: note = chemically synthesized
  source 1..20: mol_type = other DNA
agggttaaatagcgtggtca

SEQ ID NO: 53891 - DNA, 20 bp, synthetic construct
  misc_feature 1..20: note = chemically synthesized
  source 1..20: mol_type = other DNA
gttaaatagcgtggtcagag

SEQ ID NO: 53892 - DNA, 20 bp, synthetic construct
  misc_feature 1..20: note = chemically synthesized
  source 1..20: mol_type = other DNA
ttaaatagcgtggtcagagt

SEQ ID NO: 53893 - DNA, 20 bp, synthetic construct
  misc_feature 1..20: note = chemically synthesized
  source 1..20: mol_type = other DNA
tggtcagagtaggactcact

SEQ ID NO: 53894 - DNA, 20 bp, synthetic construct
  misc_feature 1..20: note = chemically synthesized
  source 1..20: mol_type = other DNA
gtaggactcactgagaatat

SEQ ID NO: 53895 - DNA, 20 bp, synthetic construct
  misc_feature 1..20: note = chemically synthesized
  source 1..20: mol_type = other DNA
tcactgagaatatgagatct

SEQ ID NO: 53896 - DNA, 20 bp, synthetic construct
  misc_feature 1..20: note = chemically synthesized
  source 1..20: mol_type = other DNA
gagaatatgagatctgagtc

SEQ ID NO: 53897 - DNA, 20 bp, synthetic construct
  misc_feature 1..20: note = chemically synthesized
  source 1..20: mol_type = other DNA
gagatctgagtcaagtcttc

SEQ ID NO: 53898 - DNA, 20 bp, synthetic construct
  misc_feature 1..20: note = chemically synthesized
  source 1..20: mol_type = other DNA
agatctgagtcaagtcttca

SEQ ID NO: 53899 - DNA, 20 bp, synthetic construct
  misc_feature 1..20: note = chemically synthesized
  source 1..20: mol_type = other DNA
agtcaagtcttcaaggatgt

SEQ ID NO: 53900 - DNA, 20 bp, synthetic construct
  misc_feature 1..20: note = chemically synthesized
  source 1..20: mol_type = other DNA
gtcaagtcttcaaggatgtg

SEQ ID NO: 53901 - DNA, 20 bp, synthetic construct
  misc_feature 1..20: note = chemically synthesized
  source 1..20: mol_type = other DNA
aagtcttcaaggatgtgagg

SEQ ID NO: 53902 - DNA, 20 bp, synthetic construct
  misc_feature 1..20: note = chemically synthesized
  source 1..20: mol_type = other DNA
cttcaaggatgtgaggaagt

SEQ ID NO: 53903 - DNA, 20 bp, synthetic construct
  misc_feature 1..20: note = chemically synthesized
  source 1..20: mol_type = other DNA
gatgtgaggaagtaagtttc

SEQ ID NO: 53904 - DNA, 20 bp, synthetic construct
  misc_feature 1..20: note = chemically synthesized
  source 1..20: mol_type = other DNA
gtgaggaagtaagtttctgg

SEQ ID NO: 53905 - DNA, 20 bp, synthetic construct
  misc_feature 1..20: note = chemically synthesized
  source 1..20: mol_type = other DNA
aggaagtaagtttctggcag

SEQ ID NO: 53906 - DNA, 20 bp, synthetic construct
  misc_feature 1..20: note = chemically synthesized
  source 1..20: mol_type = other DNA
gaagtaagtttctggcagaa

SEQ ID NO: 53907 - DNA, 20 bp, synthetic construct
  misc_feature 1..20: note = chemically synthesized
  source 1..20: mol_type = other DNA
tttctggcagaagagctgtg

SEQ ID NO: 53908 - DNA, 20 bp, synthetic construct
  misc_feature 1..20: note = chemically synthesized
  source 1..20: mol_type = other DNA
ttctggcagaagagctgtga

SEQ ID NO: 53909 - DNA, 20 bp, synthetic construct
  misc_feature 1..20: note = chemically synthesized
  source 1..20: mol_type = other DNA
tctggcagaagagctgtgaa

SEQ ID NO: 53910 - DNA, 20 bp, synthetic construct
  misc_feature 1..20: note = chemically synthesized
  source 1..20: mol_type = other DNA
aagagctgtgaagggctgtc

SEQ ID NO: 53911 - DNA, 20 bp, synthetic construct
  misc_feature 1..20: note = chemically synthesized
  source 1..20: mol_type = other DNA
gctgtgaagggctgtctggc

SEQ ID NO: 53912 - DNA, 20 bp, synthetic construct
  misc_feature 1..20: note = chemically synthesized
  source 1..20: mol_type = other DNA
tgtgaagggctgtctggcca

SEQ ID NO: 53913 - DNA, 20 bp, synthetic construct
  misc_feature 1..20: note = chemically synthesized
  source 1..20: mol_type = other DNA
gaagggctgtctggccagag

SEQ ID NO: 53914 - DNA, 20 bp, synthetic construct
  misc_feature 1..20: note = chemically synthesized
  source 1..20: mol_type = other DNA
cagagaagattgcaatgcaa

SEQ ID NO: 53915 - DNA, 20 bp, synthetic construct
  misc_feature 1..20: note = chemically synthesized
  source 1..20: mol_type = other DNA
gattgcaatgcaaaagccct

SEQ ID NO: 53916 - DNA, 20 bp, synthetic construct
  misc_feature 1..20: note = chemically synthesized
  source 1..20: mol_type = other DNA
attgcaatgcaaaagccctg

SEQ ID NO: 53917 - DNA, 20 bp, synthetic construct
  misc_feature 1..20: note = chemically synthesized
  source 1..20: mol_type = other DNA
gcaatgcaaaagccctgagg

SEQ ID NO: 53918 - DNA, 20 bp, synthetic construct
  misc_feature 1..20: note = chemically synthesized
  source 1..20: mol_type = other DNA
caatgcaaaagccctgaggt

SEQ ID NO: 53919 - DNA, 20 bp, synthetic construct
  misc_feature 1..20: note = chemically synthesized
  source 1..20: mol_type = other DNA
ccctgaggtgggaacgtgtt

SEQ ID NO: 53920 - DNA, 20 bp, synthetic construct
  misc_feature 1..20: note = chemically synthesized
  source 1..20: mol_type = other DNA
gaacgtgtttggtgtgttta

SEQ ID NO: 53921 - DNA, 20 bp, synthetic construct
  misc_feature 1..20: note = chemically synthesized
  source 1..20: mol_type = other DNA
aacgtgtttggtgtgtttaa

SEQ ID NO: 53922 - DNA, 20 bp, synthetic construct
  misc_feature 1..20: note = chemically synthesized
  source 1..20: mol_type = other DNA
tgtttggtgtgtttaaagga

SEQ ID NO: 53923 - DNA, 20 bp, synthetic construct
  misc_feature 1..20: note = chemically synthesized
  source 1..20: mol_type = other DNA
tgtgtttaaaggaaagcaat

SEQ ID NO: 53924 - DNA, 20 bp, synthetic construct
  misc_feature 1..20: note = chemically synthesized
  source 1..20: mol_type = other DNA
gtgtttaaaggaaagcaatg

SEQ ID NO: 53925 - DNA, 20 bp, synthetic construct
  misc_feature 1..20: note = chemically synthesized
  source 1..20: mol_type = other DNA
ttaaaggaaagcaatgaggc

SEQ ID NO: 53926 - DNA, 20 bp, synthetic construct
  misc_feature 1..20: note = chemically synthesized
  source 1..20: mol_type = other DNA
ggaaagcaatgaggccagtg

SEQ ID NO: 53927 - DNA, 20 bp, synthetic construct
  misc_feature 1..20: note = chemically synthesized
  source 1..20: mol_type = other DNA
agcaatgaggccagtgtagc

SEQ ID NO: 53928 - DNA, 20 bp, synthetic construct
  misc_feature 1..20: note = chemically synthesized
  source 1..20: mol_type = other DNA
tgaggccagtgtagccagaa

SEQ ID NO: 53929 - DNA, 20 bp, synthetic construct
  misc_feature 1..20: note = chemically synthesized
  source 1..20: mol_type = other DNA
aggccagtgtagccagaaca

SEQ ID NO: 53930 - DNA, 20 bp, synthetic construct
  misc_feature 1..20: note = chemically synthesized
  source 1..20: mol_type = other DNA
gtagccagaacagagtgtgc

SEQ ID NO: 53931 - DNA, 20 bp, synthetic construct
  misc_feature 1..20: note = chemically synthesized
  source 1..20: mol_type = other DNA
tagccagaacagagtgtgca

SEQ ID NO: 53932 - DNA, 20 bp, synthetic construct
  misc_feature 1..20: note = chemically synthesized
  source 1..20: mol_type = other DNA
gccagaacagagtgtgcaag

SEQ ID NO: 53933 - DNA, 20 bp, synthetic construct
  misc_feature 1..20: note = chemically synthesized
  source 1..20: mol_type = other DNA
cagaacagagtgtgcaagga

SEQ ID NO: 53934 - DNA, 20 bp, synthetic construct
  misc_feature 1..20: note = chemically synthesized
  source 1..20: mol_type = other DNA
aacagagtgtgcaaggagag

SEQ ID NO: 53935 - DNA, 20 bp, synthetic construct
  misc_feature 1..20: note = chemically synthesized
  source 1..20: mol_type = other DNA
acagagtgtgcaaggagaga

SEQ ID NO: 53936 - DNA, 20 bp, synthetic construct
  misc_feature 1..20: note = chemically synthesized
  source 1..20: mol_type = other DNA
gtgtgcaaggagagaaggaa

SEQ ID NO: 53937 - DNA, 20 bp, synthetic construct
  misc_feature 1..20: note = chemically synthesized
  source 1..20: mol_type = other DNA
tgcaaggagagaaggaacag

SEQ ID NO: 53938 - DNA, 20 bp, synthetic construct
  misc_feature 1..20: note = chemically synthesized
  source 1..20: mol_type = other DNA
gagagaaggaacagaagatg

SEQ ID NO: 53939 - DNA, 20 bp, synthetic construct
  misc_feature 1..20: note = chemically synthesized
  source 1..20: mol_type = other DNA
gagaaggaacagaagatgtg

SEQ ID NO: 53940 - DNA, 20 bp, synthetic construct
  misc_feature 1..20: note = chemically synthesized
  source 1..20: mol_type = other DNA
agaaggaacagaagatgtgg

SEQ ID NO: 53941 - DNA, 20 bp, synthetic construct
  misc_feature 1..20: note = chemically synthesized
  source 1..20: mol_type = other DNA
gaaggaacagaagatgtgga

SEQ ID NO: 53942 - DNA, 20 bp, synthetic construct
  misc_feature 1..20: note = chemically synthesized
  source 1..20: mol_type = other DNA
ggaacagaagatgtggaggg

SEQ ID NO: 53943 - DNA, 20 bp, synthetic construct
  misc_feature 1..20: note = chemically synthesized
  source 1..20: mol_type = other DNA
agaagatgtggagggcagat

SEQ ID NO: 53944 - DNA, 20 bp, synthetic construct
  misc_feature 1..20: note = chemically synthesized
  source 1..20: mol_type = other DNA
tcagtttgtaattgtacgcc

SEQ ID NO: 53945 - DNA, 20 bp, synthetic construct
  misc_feature 1..20: note = chemically synthesized
  source 1..20: mol_type = other DNA
ctgattctttgtgtaatctc

SEQ ID NO: 53946 - DNA, 20 bp, synthetic construct
  misc_feature 1..20: note = chemically synthesized
  source 1..20: mol_type = other DNA
tccagactgtattaaactgc

SEQ ID NO: 53947 - DNA, 20 bp, synthetic construct
  misc_feature 1..20: note = chemically synthesized
  source 1..20: mol_type = other DNA
cagactgtattaaactgcaa

SEQ ID NO: 53948 - DNA, 20 bp, synthetic construct
  misc_feature 1..20: note = chemically synthesized
  source 1..20: mol_type = other DNA
actgtattaaactgcaagag

SEQ ID NO: 53949 - DNA, 20 bp, synthetic construct
  misc_feature 1..20: note = chemically synthesized
  source 1..20: mol_type = other DNA
ctgtattaaactgcaagagc

SEQ ID NO: 53950 - DNA, 20 bp, synthetic construct
  misc_feature 1..20: note = chemically synthesized
  source 1..20: mol_type = other DNA
tgtattaaactgcaagagca

SEQ ID NO: 53951 - DNA, 20 bp, synthetic construct
  misc_feature 1..20: note = chemically synthesized
  source 1..20: mol_type = other DNA
gcaagagcagggcccctctc

SEQ ID NO: 53952 - DNA, 20 bp, synthetic construct
  misc_feature 1..20: note = chemically synthesized
  source 1..20: mol_type = other DNA
tttgctcatcattgtattcc

SEQ ID NO: 53953 - DNA, 20 bp, synthetic construct
  misc_feature 1..20: note = chemically synthesized
  source 1..20: mol_type = other DNA
tgctcatcattgtattccca

SEQ ID NO: 53954 - DNA, 20 bp, synthetic construct
  misc_feature 1..20: note = chemically synthesized
  source 1..20: mol_type = other DNA
ccagagccttgcacaatgct

SEQ ID NO: 53955 - DNA, 20 bp, synthetic construct
  misc_feature 1..20: note = chemically synthesized
  source 1..20: mol_type = other DNA
cttgcacaatgcttggtgca

SEQ ID NO: 53956 - DNA, 20 bp, synthetic construct
  misc_feature 1..20: note = chemically synthesized
  source 1..20: mol_type = other DNA
ttgcacaatgcttggtgcat

SEQ ID NO: 53957 - DNA, 20 bp, synthetic construct
  misc_feature 1..20: note = chemically synthesized
  source 1..20: mol_type = other DNA
gcacaatgcttggtgcatag

SEQ ID NO: 53958 - DNA, 20 bp, synthetic construct
  misc_feature 1..20: note = chemically synthesized
  source 1..20: mol_type = other DNA
aatgcttggtgcataggaga

SEQ ID NO: 53959 - DNA, 20 bp, synthetic construct
  misc_feature 1..20: note = chemically synthesized
  source 1..20: mol_type = other DNA
tttgttaaataaatgaatta

SEQ ID NO: 53960 - DNA, 20 bp, synthetic construct
  misc_feature 1..20: note = chemically synthesized
  source 1..20: mol_type = other DNA
aatgaattatggataacgaa

SEQ ID NO: 53961 - DNA, 20 bp, synthetic construct
  misc_feature 1..20: note = chemically synthesized
  source 1..20: mol_type = other DNA
aattatggataacgaatgga

SEQ ID NO: 53962 - DNA, 20 bp, synthetic construct
  misc_feature 1..20: note = chemically synthesized
  source 1..20: mol_type = other DNA
atggataacgaatggatggt

SEQ ID NO: 53963 - DNA, 20 bp, synthetic construct
  misc_feature 1..20: note = chemically synthesized
  source 1..20: mol_type = other DNA
ataacgaatggatggtaaga

SEQ ID NO: 53964 - DNA, 20 bp, synthetic construct
  misc_feature 1..20: note = chemically synthesized
  source 1..20: mol_type = other DNA
taacgaatggatggtaagat

SEQ ID NO: 53965 - DNA, 20 bp, synthetic construct
  misc_feature 1..20: note = chemically synthesized
  source 1..20: mol_type = other DNA
cgaatggatggtaagatggg

SEQ ID NO: 53966 - DNA, 20 bp, synthetic construct
  misc_feature 1..20: note = chemically synthesized
  source 1..20: mol_type = other DNA
tggatggtaagatgggtgga

SEQ ID NO: 53967 - DNA, 20 bp, synthetic construct
  misc_feature 1..20: note = chemically synthesized
  source 1..20: mol_type = other DNA
tggtaagatgggtggatgga

SEQ ID NO: 53968 - DNA, 20 bp, synthetic construct
  misc_feature 1..20: note = chemically synthesized
  source 1..20: mol_type = other DNA
ggtaagatgggtggatggat

SEQ ID NO: 53969 - DNA, 20 bp, synthetic construct
  misc_feature 1..20: note = chemically synthesized
  source 1..20: mol_type = other DNA
gtaagatgggtggatggatg

SEQ ID NO: 53970 - DNA, 20 bp, synthetic construct
  misc_feature 1..20: note = chemically synthesized
  source 1..20: mol_type = other DNA
taagatgggtggatggatgg

SEQ ID NO: 53971 - DNA, 20 bp, synthetic construct
  misc_feature 1..20: note = chemically synthesized
  source 1..20: mol_type = other DNA
aagatgggtggatggatggg

SEQ ID NO: 53972 - DNA, 20 bp, synthetic construct
  misc_feature 1..20: note = chemically synthesized
  source 1..20: mol_type = other DNA
gtggatggatggggggtgaa

SEQ ID NO: 53973 - DNA, 20 bp, synthetic construct
  misc_feature 1..20: note = chemically synthesized
  source 1..20: mol_type = other DNA
atggatggggggtgaacgga

SEQ ID NO: 53974 - DNA, 20 bp, synthetic construct
  misc_feature 1..20: note = chemically synthesized
  source 1..20: mol_type = other DNA
atggggggtgaacggatgga

SEQ ID NO: 53975 - DNA, 20 bp, synthetic construct
  misc_feature 1..20: note = chemically synthesized
  source 1..20: mol_type = other DNA
tggggggtgaacggatggat

SEQ ID NO: 53976 - DNA, 20 bp, synthetic construct
  misc_feature 1..20: note = chemically synthesized
  source 1..20: mol_type = other DNA
ggggggtgaacggatggatg

SEQ ID NO: 53977 - DNA, 20 bp, synthetic construct
  misc_feature 1..20: note = chemically synthesized
  source 1..20: mol_type = other DNA
gggggtgaacggatggatgg

SEQ ID NO: 53978 - DNA, 20 bp, synthetic construct
  misc_feature 1..20: note = chemically synthesized
  source 1..20: mol_type = other DNA
ggggtgaacggatggatggg

SEQ ID NO: 53979 - DNA, 20 bp, synthetic construct
  misc_feature 1..20: note = chemically synthesized
  source 1..20: mol_type = other DNA
acggatggatggggggtgaa

SEQ ID NO: 53980 - DNA, 20 bp, synthetic construct
  misc_feature 1..20: note = chemically synthesized
  source 1..20: mol_type = other DNA
atggatggggggtgaatgga

SEQ ID NO: 53981 - DNA, 20 bp, synthetic construct
  misc_feature 1..20: note = chemically synthesized
  source 1..20: mol_type = other DNA
ggggtgaatggatggatgaa

SEQ ID NO: 53982 - DNA, 20 bp, synthetic construct
  misc_feature 1..20: note = chemically synthesized
  source 1..20: mol_type = other DNA
gggtgaatggatggatgaat

SEQ ID NO: 53983 - DNA, 20 bp, synthetic construct
  misc_feature 1..20: note = chemically synthesized
  source 1..20: mol_type = other DNA
tgaatggatggatgaatggg

SEQ ID NO: 53984 - DNA, 20 bp, synthetic construct
  misc_feature 1..20: note = chemically synthesized
  source 1..20: mol_type = other DNA
tggatggatgaatgggtaga

SEQ ID NO: 53985 - DNA, 20 bp, synthetic construct
  misc_feature 1..20: note = chemically synthesized
  source 1..20: mol_type = other DNA
ggatggatgaatgggtagat

SEQ ID NO: 53986 - DNA, 20 bp, synthetic construct
  misc_feature 1..20: note = chemically synthesized
  source 1..20: mol_type = other DNA
tggatgaatgggtagatggg

SEQ ID NO: 53987 - DNA, 20 bp, synthetic construct
  misc_feature 1..20: note = chemically synthesized
  source 1..20: mol_type = other DNA
tgaatgggtagatgggtgga

SEQ ID NO: 53988 - DNA, 20 bp, synthetic construct
  misc_feature 1..20: note = chemically synthesized
  source 1..20: mol_type = other DNA
gaatgggtagatgggtggat

SEQ ID NO: 53989 - DNA, 20 bp, synthetic construct
  misc_feature 1..20: note = chemically synthesized
  source 1..20: mol_type = other DNA
aatgggtagatgggtggata

SEQ ID NO: 53990 - DNA, 20 bp, synthetic construct
  misc_feature 1..20: note = chemically synthesized
  source 1..20: mol_type = other DNA
atgggtagatgggtggatag

SEQ ID NO: 53991 - DNA, 20 bp, synthetic construct
  misc_feature 1..20: note = chemically synthesized
  source 1..20: mol_type = other DNA
tgggtagatgggtggatagg

SEQ ID NO: 53992 - DNA, 20 bp, synthetic construct
  misc_feature 1..20: note = chemically synthesized
  source 1..20: mol_type = other DNA
tagatgggtggataggggga

SEQ ID NO: 53993 - DNA, 20 bp, synthetic construct
  misc_feature 1..20: note = chemically synthesized
  source 1..20: mol_type = other DNA
tgggtggatagggggatggc

SEQ ID NO: 53994 - DNA, 20 bp, synthetic construct
  misc_feature 1..20: note = chemically synthesized
  source 1..20: mol_type = other DNA
gggtggatagggggatggct

SEQ ID NO: 53995 - DNA, 20 bp, synthetic construct
  misc_feature 1..20: note = chemically synthesized
  source 1..20: mol_type = other DNA
tggatagggggatggctggg

SEQ ID NO: 53996 - DNA, 20 bp, synthetic construct
  misc_feature 1..20: note = chemically synthesized
  source 1..20: mol_type = other DNA
tagggggatggctgggtggc

SEQ ID NO: 53997 - DNA, 20 bp, synthetic construct
  misc_feature 1..20: note = chemically synthesized
  source 1..20: mol_type = other DNA
agggggatggctgggtggct

SEQ ID NO: 53998 - DNA, 20 bp, synthetic construct
  misc_feature 1..20: note = chemically synthesized
  source 1..20: mol_type = other DNA
gggatggctgggtggctggg

SEQ ID NO: 53999 - DNA, 20 bp, synthetic construct
  misc_feature 1..20: note = chemically synthesized
  source 1..20: mol_type = other DNA
gtagatgatgcactgtctcc

SEQ ID NO: 54000 - DNA, 20 bp, synthetic construct
  misc_feature 1..20: note = chemically synthesized
  source 1..20: mol_type = other DNA
tgatgcactgtctcccagat

SEQ ID NO: 54001 - DNA, 20 bp, synthetic construct
  misc_feature 1..20: note = chemically synthesized
  source 1..20: mol_type = other DNA
gatgcactgtctcccagatg

SEQ ID NO: 54002 - DNA, 20 bp, synthetic construct
  misc_feature 1..20: note = chemically synthesized
  source 1..20: mol_type = other DNA
ccattctctttcctgccctt

SEQ ID NO: 54003 - DNA, 20 bp, synthetic construct
  misc_feature 1..20: note = chemically synthesized
  source 1..20: mol_type = other DNA
cattctctttcctgcccttt

SEQ ID NO: 54004 - DNA, 20 bp, synthetic construct
  misc_feature 1..20: note = chemically synthesized
  source 1..20: mol_type = other DNA
attctctttcctgcccttta

SEQ ID NO: 54005 - DNA, 20 bp, synthetic construct
  misc_feature 1..20: note = chemically synthesized
  source 1..20: mol_type = other DNA
tctctttcctgccctttagg

SEQ ID NO: 54006 - DNA, 20 bp, synthetic construct
  misc_feature 1..20: note = chemically synthesized
  source 1..20: mol_type = other DNA
tgccctttagggagcccctc

SEQ ID NO: 54007 - DNA, 20 bp, synthetic construct
  misc_feature 1..20: note = chemically synthesized
  source 1..20: mol_type = other DNA
gagcccctctggccatgcca

SEQ ID NO: 54008 - DNA, 20 bp, synthetic construct
  misc_feature 1..20: note = chemically synthesized
  source 1..20: mol_type = other DNA
agcccctctggccatgccat

SEQ ID NO: 54009 - DNA, 20 bp, synthetic construct
  misc_feature 1..20: note = chemically synthesized
  source 1..20: mol_type = other DNA
ctctggccatgccatgggca

SEQ ID NO: 54010 - DNA, 20 bp, synthetic construct
  misc_feature 1..20: note = chemically synthesized
  source 1..20: mol_type = other DNA
tggccatgccatgggcacag

SEQ ID NO: 54011 - DNA, 20 bp, synthetic construct
  misc_feature 1..20: note = chemically synthesized
  source 1..20: mol_type = other DNA
ggccatgccatgggcacagc

SEQ ID NO: 54012 - DNA, 20 bp, synthetic construct
  misc_feature 1..20: note = chemically synthesized
  source 1..20: mol_type = other DNA
agcaggtgtatactacgtga

SEQ ID NO: 54013 - DNA, 20 bp, synthetic construct
  misc_feature 1..20: note = chemically synthesized
  source 1..20: mol_type = other DNA
catctactctttccatcttt

SEQ ID NO: 54014 - DNA, 20 bp, synthetic construct
  misc_feature 1..20: note = chemically synthesized
  source 1..20: mol_type = other DNA
atctactctttccatctttc

SEQ ID NO: 54015 - DNA, 20 bp, synthetic construct
  misc_feature 1..20: note = chemically synthesized
  source 1..20: mol_type = other DNA
tctactctttccatctttca

SEQ ID NO: 54016 - DNA, 20 bp, synthetic construct
  misc_feature 1..20: note = chemically synthesized
  source 1..20: mol_type = other DNA
ctctttccatctttcaggga

SEQ ID NO: 54017 - DNA, 20 bp, synthetic construct
  misc_feature 1..20: note = chemically synthesized
  source 1..20: mol_type = other DNA
ccatctttcagggaaagata

SEQ ID NO: 54018 - DNA, 20 bp, synthetic construct
  misc_feature 1..20: note = chemically synthesized
  source 1..20: mol_type = other DNA
ggaaagataaagccgaccta

SEQ ID NO: 54019 - DNA, 20 bp, synthetic construct
  misc_feature 1..20: note = chemically synthesized
  source 1..20: mol_type = other DNA
taaagccgacctacagattt

SEQ ID NO: 54020 - DNA, 20 bp, synthetic construct
  misc_feature 1..20: note = chemically synthesized
  source 1..20: mol_type = other DNA
gccgacctacagatttcggt

SEQ ID NO: 54021 - DNA, 20 bp, synthetic construct
  misc_feature 1..20: note = chemically synthesized
  source 1..20: mol_type = other DNA
tttcggtaagaactcaccac

SEQ ID NO: 54022 - DNA, 20 bp, synthetic construct
  misc_feature 1..20: note = chemically synthesized
  source 1..20: mol_type = other DNA
ttcggtaagaactcaccact

SEQ ID NO: 54023 - DNA, 20 bp, synthetic construct
  misc_feature 1..20: note = chemically synthesized
  source 1..20: mol_type = other DNA
tcggtaagaactcaccactg

SEQ ID NO: 54024 - DNA, 20 bp, synthetic construct
  misc_feature 1..20: note = chemically synthesized
  source 1..20: mol_type = other DNA
aagaactcaccactggggtg

SEQ ID NO: 54025 - DNA, 20 bp, synthetic construct
  misc_feature 1..20: note = chemically synthesized
  source 1..20: mol_type = other DNA
agaactcaccactggggtgt

SEQ ID NO: 54026 - DNA, 20 bp, synthetic construct
  misc_feature 1..20: note = chemically synthesized
  source 1..20: mol_type = other DNA
actcaccactggggtgtagg

SEQ ID NO: 54027 - DNA, 20 bp, synthetic construct
  misc_feature 1..20: note = chemically synthesized
  source 1..20: mol_type = other DNA
caccactggggtgtaggtgg

SEQ ID NO: 54028 - DNA, 20 bp, synthetic construct
  misc_feature 1..20: note = chemically synthesized
  source 1..20: mol_type = other DNA
ccactggggtgtaggtggtg

SEQ ID NO: 54029 - DNA, 20 bp, synthetic construct
  misc_feature 1..20: note = chemically synthesized
  source 1..20: mol_type = other DNA
cactggggtgtaggtggtgg

SEQ ID NO: 54030 - DNA, 20 bp, synthetic construct
  misc_feature 1..20: note = chemically synthesized
  source 1..20: mol_type = other DNA
actggggtgtaggtggtgga

SEQ ID NO: 54031 - DNA, 20 bp, synthetic construct
  misc_feature 1..20: note = chemically synthesized
  source 1..20: mol_type = other DNA
ggggtgtaggtggtggaggg

SEQ ID NO: 54032 - DNA, 20 bp, synthetic construct
  misc_feature 1..20: note = chemically synthesized
  source 1..20: mol_type = other DNA
gggtgtaggtggtggagggc

SEQ ID NO: 54033 - DNA, 20 bp, synthetic construct
  misc_feature 1..20: note = chemically synthesized
  source 1..20: mol_type = other DNA
gtgtaggtggtggagggcag

SEQ ID NO: 54034 - DNA, 20 bp, synthetic construct
  misc_feature 1..20: note = chemically synthesized
  source 1..20: mol_type = other DNA
tgtaggtggtggagggcagg

SEQ ID NO: 54035 - DNA, 20 bp, synthetic construct
  misc_feature 1..20: note = chemically synthesized
  source 1..20: mol_type = other DNA
aggtggtggagggcaggagg

SEQ ID NO: 54036 - DNA, 20 bp, synthetic construct
  misc_feature 1..20: note = chemically synthesized
  source 1..20: mol_type = other DNA
gcaggaggcagctctctctg

SEQ ID NO: 54037 - DNA, 20 bp, synthetic construct
  misc_feature 1..20: note = chemically synthesized
  source 1..20: mol_type = other DNA
tattcttcctcacatccccc

SEQ ID NO: 54038 - DNA, 20 bp, synthetic construct
  misc_feature 1..20: note = chemically synthesized
  source 1..20: mol_type = other DNA
ccctagcccgctcccacacc

SEQ ID NO: 54039 - DNA, 20 bp, synthetic construct
  misc_feature 1..20: note = chemically synthesized
  source 1..20: mol_type = other DNA
cctagcccgctcccacacct

SEQ ID NO: 54040 - DNA, 20 bp, synthetic construct
  misc_feature 1..20: note = chemically synthesized
  source 1..20: mol_type = other DNA
agcccgctcccacacctggg

SEQ ID NO: 54041 - DNA, 20 bp, synthetic construct
  misc_feature 1..20: note = chemically synthesized
  source 1..20: mol_type = other DNA
cacctgggcagccgctgatt

SEQ ID NO: 54042 - DNA, 20 bp, synthetic construct
  misc_feature 1..20: note = chemically synthesized
  source 1..20: mol_type = other DNA
cctgggcagccgctgattaa

SEQ ID NO: 54043 - DNA, 20 bp, synthetic construct
  misc_feature 1..20: note = chemically synthesized
  source 1..20: mol_type = other DNA
cagccgctgattaagagttg

SEQ ID NO: 54044 - DNA, 20 bp, synthetic construct
  misc_feature 1..20: note = chemically synthesized
  source 1..20: mol_type = other DNA
gattaagagttgtggcactt

SEQ ID NO: 54045 - DNA, 20 bp, synthetic construct
  misc_feature 1..20: note = chemically synthesized
  source 1..20: mol_type = other DNA
aagagttgtggcactttgga

SEQ ID NO: 54046 - DNA, 20 bp, synthetic construct
  misc_feature 1..20: note = chemically synthesized
  source 1..20: mol_type = other DNA
agagttgtggcactttggat

SEQ ID NO: 54047 - DNA, 20 bp, synthetic construct
  misc_feature 1..20: note = chemically synthesized
  source 1..20: mol_type = other DNA
gagttgtggcactttggata

SEQ ID NO: 54048 - DNA, 20 bp, synthetic construct
  misc_feature 1..20: note = chemically synthesized
  source 1..20: mol_type = other DNA
ctttggatagggataaacct

SEQ ID NO: 54049 - DNA, 20 bp, synthetic construct
  misc_feature 1..20: note = chemically synthesized
  source 1..20: mol_type = other DNA
ttggatagggataaacctca

SEQ ID NO: 54050 - DNA, 20 bp, synthetic construct
  misc_feature 1..20: note = chemically synthesized
  source 1..20: mol_type = other DNA
atagggataaacctcagagt

SEQ ID NO: 54051 - DNA, 20 bp, synthetic construct
  misc_feature 1..20: note = chemically synthesized
  source 1..20: mol_type = other DNA
tagggataaacctcagagtc

SEQ ID NO: 54052 - DNA, 20 bp, synthetic construct
  misc_feature 1..20: note = chemically synthesized
  source 1..20: mol_type = other DNA
agggataaacctcagagtca

SEQ ID NO: 54053 - DNA, 20 bp, synthetic construct
  misc_feature 1..20: note = chemically synthesized
  source 1..20: mol_type = other DNA
cctcagagtcagggaatgtt

SEQ ID NO: 54054 - DNA, 20 bp, synthetic construct
  misc_feature 1..20: note = chemically synthesized
  source 1..20: mol_type = other DNA
ctcagagtcagggaatgttt

SEQ ID NO: 54055 - DNA, 20 bp, synthetic construct
  misc_feature 1..20: note = chemically synthesized
  source 1..20: mol_type = other DNA
tcagggaatgtttgggctga

SEQ ID NO: 54056 - DNA, 20 bp, synthetic construct
  misc_feature 1..20: note = chemically synthesized
  source 1..20: mol_type = other DNA
cagggaatgtttgggctgaa

SEQ ID NO: 54057 - DNA, 20 bp, synthetic construct
  misc_feature 1..20: note = chemically synthesized
  source 1..20: mol_type = other DNA
agggaatgtttgggctgaaa

SEQ ID NO: 54058 - DNA, 20 bp, synthetic construct
  misc_feature 1..20: note = chemically synthesized
  source 1..20: mol_type = other DNA
tgtttgggctgaaagggatc

SEQ ID NO: 54059 - DNA, 20 bp, synthetic construct
  misc_feature 1..20: note = chemically synthesized
  source 1..20: mol_type = other DNA
ttgggctgaaagggatccag

SEQ ID NO: 54060 - DNA, 20 bp, synthetic construct
  misc_feature 1..20: note = chemically synthesized
  source 1..20: mol_type = other DNA
tagtgcaatccgttgtttta

SEQ ID NO: 54061 - DNA, 20 bp, synthetic construct
  misc_feature 1..20: note = chemically synthesized
  source 1..20: mol_type = other DNA
caatccgttgttttacagat

SEQ ID NO: 54062 - DNA, 20 bp, synthetic construct
  misc_feature 1..20: note = chemically synthesized
  source 1..20: mol_type = other DNA
aatccgttgttttacagata

SEQ ID NO: 54063 - DNA, 20 bp, synthetic construct
  misc_feature 1..20: note = chemically synthesized
  source 1..20: mol_type = other DNA
gttttacagataaggaaaca

SEQ ID NO: 54064 - DNA, 20 bp, synthetic construct
  misc_feature 1..20: note = chemically synthesized
  source 1..20: mol_type = other DNA
aaacaaagcccaacaccatg

SEQ ID NO: 54065 - DNA, 20 bp, synthetic construct
  misc_feature 1..20: note = chemically synthesized
  source 1..20: mol_type = other DNA
aacaaagcccaacaccatga

SEQ ID NO: 54066 - DNA, 20 bp, synthetic construct
  misc_feature 1..20: note = chemically synthesized
  source 1..20: mol_type = other DNA
acaaagcccaacaccatgaa

SEQ ID NO: 54067 - DNA, 20 bp, synthetic construct
  misc_feature 1..20: note = chemically synthesized
  source 1..20: mol_type = other DNA
atgaagggacttataaaaat

SEQ ID NO: 54068 - DNA, 20 bp, synthetic construct
  misc_feature 1..20: note = chemically synthesized
  source 1..20: mol_type = other DNA
tgaagggacttataaaaata

SEQ ID NO: 54069 - DNA, 20 bp, synthetic construct
  misc_feature 1..20: note = chemically synthesized
  source 1..20: mol_type = other DNA
agggacttataaaaataagg

SEQ ID NO: 54070 - DNA, 20 bp, synthetic construct
  misc_feature 1..20: note = chemically synthesized
  source 1..20: mol_type = other DNA
cttataaaaataaggtagtg

SEQ ID NO: 54071 - DNA, 20 bp, synthetic construct
  misc_feature 1..20: note = chemically synthesized
  source 1..20: mol_type = other DNA
ataaaaataaggtagtgaag

SEQ ID NO: 54072 - DNA, 20 bp, synthetic construct
  misc_feature 1..20: note = chemically synthesized
  source 1..20: mol_type = other DNA
aaaataaggtagtgaagtag

SEQ ID NO: 54073 - DNA, 20 bp, synthetic construct
  misc_feature 1..20: note = chemically synthesized
  source 1..20: mol_type = other DNA
ataaggtagtgaagtagcag

SEQ ID NO: 54074 - DNA, 20 bp, synthetic construct
  misc_feature 1..20: note = chemically synthesized
  source 1..20: mol_type = other DNA
taaggtagtgaagtagcagc

SEQ ID NO: 54075 - DNA, 20 bp, synthetic construct
  misc_feature 1..20: note = chemically synthesized
  source 1..20: mol_type = other DNA
aaggtagtgaagtagcagca

SEQ ID NO: 54076 - DNA, 20 bp, synthetic construct
  misc_feature 1..20: note = chemically synthesized
  source 1..20: mol_type = other DNA
acccatgtctgtaccaacca

SEQ ID NO: 54077 - DNA, 20 bp, synthetic construct
  misc_feature 1..20: note = chemically synthesized
  source 1..20: mol_type = other DNA
ccatgtctgtaccaaccaca

SEQ ID NO: 54078 - DNA, 20 bp, synthetic construct
  misc_feature 1..20: note = chemically synthesized
  source 1..20: mol_type = other DNA
caaccacagagtcacccatc

SEQ ID NO: 54079 - DNA, 20 bp, synthetic construct
  misc_feature 1..20: note = chemically synthesized
  source 1..20: mol_type = other DNA
aaccacagagtcacccatcc

SEQ ID NO: 54080 - DNA, 20 bp, synthetic construct
  misc_feature 1..20: note = chemically synthesized
  source 1..20: mol_type = other DNA
cccatccaggttaaaataac

SEQ ID NO: 54081 - DNA, 20 bp, synthetic construct
  misc_feature 1..20: note = chemically synthesized
  source 1..20: mol_type = other DNA
catccaggttaaaataacca

SEQ ID NO: 54082 - DNA, 20 bp, synthetic construct
  misc_feature 1..20: note = chemically synthesized
  source 1..20: mol_type = other DNA
ggttaaaataaccagagaaa

SEQ ID NO: 54083 - DNA, 20 bp, synthetic construct
  misc_feature 1..20: note = chemically synthesized
  source 1..20: mol_type = other DNA
taaaataaccagagaaacag

SEQ ID NO: 54084 - DNA, 20 bp, synthetic construct
  misc_feature 1..20: note = chemically synthesized
  source 1..20: mol_type = other DNA
aacagaagatattcctacta

SEQ ID NO: 54085 - DNA, 20 bp, synthetic construct
  misc_feature 1..20: note = chemically synthesized
  source 1..20: mol_type = other DNA
cagaagatattcctactaca

SEQ ID NO: 54086 - DNA, 20 bp, synthetic construct
  misc_feature 1..20: note = chemically synthesized
  source 1..20: mol_type = other DNA
attcctactacagagaattc

SEQ ID NO: 54087 - DNA, 20 bp, synthetic construct
  misc_feature 1..20: note = chemically synthesized
  source 1..20: mol_type = other DNA
ttcctactacagagaattcc

SEQ ID NO: 54088 - DNA, 20 bp, synthetic construct
  misc_feature 1..20: note = chemically synthesized
  source 1..20: mol_type = other DNA
tacagagaattccgggtgtg

SEQ ID NO: 54089 - DNA, 20 bp, synthetic construct
  misc_feature 1..20: note = chemically synthesized
  source 1..20: mol_type = other DNA
gaattccgggtgtgcagcca

SEQ ID NO: 54090 - DNA, 20 bp, synthetic construct
  misc_feature 1..20: note = chemically synthesized
  source 1..20: mol_type = other DNA
tcctttttatttttattttt

SEQ ID NO: 54091 - DNA, 20 bp, synthetic construct
  misc_feature 1..20: note = chemically synthesized
  source 1..20: mol_type = other DNA
ttatttttatttttgagatg

SEQ ID NO: 54092 - DNA, 20 bp, synthetic construct
  misc_feature 1..20: note = chemically synthesized
  source 1..20: mol_type = other DNA
tgcagtctcgctctgtcatc

SEQ ID NO: 54093 - DNA, 20 bp, synthetic construct
  misc_feature 1..20: note = chemically synthesized
  source 1..20: mol_type = other DNA
gcagtctcgctctgtcatcc

SEQ ID NO: 54094 - DNA, 20 bp, synthetic construct
  misc_feature 1..20: note = chemically synthesized
  source 1..20: mol_type = other DNA
tcgctctgtcatccaggctg

SEQ ID NO: 54095 - DNA, 20 bp, synthetic construct
  misc_feature 1..20: note = chemically synthesized
  source 1..20: mol_type = other DNA
ctgtcatccaggctgaagtg

SEQ ID NO: 54096 - DNA, 20 bp, synthetic construct
  misc_feature 1..20: note = chemically synthesized
  source 1..20: mol_type = other DNA
tcatccaggctgaagtgcag

SEQ ID NO: 54097 - DNA, 20 bp, synthetic construct
  misc_feature 1..20: note = chemically synthesized
  source 1..20: mol_type = other DNA
tcgctgcaacctctgcctcc

SEQ ID NO: 54098 - DNA, 20 bp, synthetic construct
  misc_feature 1..20: note = chemically synthesized
  source 1..20: mol_type = other DNA
cgctgcaacctctgcctccc

SEQ ID NO: 54099 - DNA, 20 bp, synthetic construct
  misc_feature 1..20: note = chemically synthesized
  source 1..20: mol_type = other DNA
aacctctgcctcccaggctc

SEQ ID NO: 54100 - DNA, 20 bp, synthetic construct
  misc_feature 1..20: note = chemically synthesized
  source 1..20: mol_type = other DNA
ctcaagcgatcctcccacct

SEQ ID NO: 54101 - DNA, 20 bp, synthetic construct
  misc_feature 1..20: note = chemically synthesized
  source 1..20: mol_type = other DNA
tcctcccacctcagccatct

SEQ ID NO: 54102 - DNA, 20 bp, synthetic construct
  misc_feature 1..20: note = chemically synthesized
  source 1..20: mol_type = other DNA
tcccacctcagccatctgag

SEQ ID NO: 54103 - DNA, 20 bp, synthetic construct
  misc_feature 1..20: note = chemically synthesized
  source 1..20: mol_type = other DNA
acctcagccatctgagtagc

SEQ ID NO: 54104 - DNA, 20 bp, synthetic construct
  misc_feature 1..20: note = chemically synthesized
  source 1..20: mol_type = other DNA
cctcagccatctgagtagct

SEQ ID NO: 54105 - DNA, 20 bp, synthetic construct
  misc_feature 1..20: note = chemically synthesized
  source 1..20: mol_type = other DNA
catctgagtagctgggacca

SEQ ID NO: 54106 - DNA, 20 bp, synthetic construct
  misc_feature 1..20: note = chemically synthesized
  source 1..20: mol_type = other DNA
atctgagtagctgggaccac

SEQ ID NO: 54107 - DNA, 20 bp, synthetic construct
  misc_feature 1..20: note = chemically synthesized
  source 1..20: mol_type = other DNA
cacaggccacacaccacacc

SEQ ID NO: 54108 - DNA, 20 bp, synthetic construct
  misc_feature 1..20: note = chemically synthesized
  source 1..20: mol_type = other DNA
taatttctcgtatctttttg

SEQ ID NO: 54109 - DNA, 20 bp, synthetic construct
  misc_feature 1..20: note = chemically synthesized
  source 1..20: mol_type = other DNA
atttctcgtatctttttgta

SEQ ID NO: 54110 - DNA, 20 bp, synthetic construct
  misc_feature 1..20: note = chemically synthesized
  source 1..20: mol_type = other DNA
ctcgtatctttttgtagaga

SEQ ID NO: 54111 - DNA, 20 bp, synthetic construct
  misc_feature 1..20: note = chemically synthesized
  source 1..20: mol_type = other DNA
cgtatctttttgtagagaca

SEQ ID NO: 54112 - DNA, 20 bp, synthetic construct
  misc_feature 1..20: note = chemically synthesized
  source 1..20: mol_type = other DNA
cagagttctgctatgttgcc

SEQ ID NO: 54113 - DNA, 20 bp, synthetic construct
  misc_feature 1..20: note = chemically synthesized
  source 1..20: mol_type = other DNA
agagttctgctatgttgccc

SEQ ID NO: 54114 - DNA, 20 bp, synthetic construct
  misc_feature 1..20: note = chemically synthesized
  source 1..20: mol_type = other DNA
tctgctatgttgcccaggct

SEQ ID NO: 54115 - DNA, 20 bp, synthetic construct
  misc_feature 1..20: note = chemically synthesized
  source 1..20: mol_type = other DNA
ctgctatgttgcccaggctc

SEQ ID NO: 54116 - DNA, 20 bp, synthetic construct
  misc_feature 1..20: note = chemically synthesized
  source 1..20: mol_type = other DNA
tatgttgcccaggctcaggc

SEQ ID NO: 54117 - DNA, 20 bp, synthetic construct
  misc_feature 1..20: note = chemically synthesized
  source 1..20: mol_type = other DNA
ctcaggctggtcttgatctc

SEQ ID NO: 54118 - DNA, 20 bp, synthetic construct
  misc_feature 1..20: note = chemically synthesized
  source 1..20: mol_type = other DNA
tggtcttgatctcaagcaat

SEQ ID NO: 54119 - DNA, 20 bp, synthetic construct
  misc_feature 1..20: note = chemically synthesized
  source 1..20: mol_type = other DNA
ctcaagcaattggcttgcct

SEQ ID NO: 54120 - DNA, 20 bp, synthetic construct
  misc_feature 1..20: note = chemically synthesized
  source 1..20: mol_type = other DNA
gcctcagcctcctaaaatat

SEQ ID NO: 54121 - DNA, 20 bp, synthetic construct
  misc_feature 1..20: note = chemically synthesized
  source 1..20: mol_type = other DNA
cctcagcctcctaaaatatt

SEQ ID NO: 54122 - DNA, 20 bp, synthetic construct
  misc_feature 1..20: note = chemically synthesized
  source 1..20: mol_type = other DNA
ctcctaaaatattgggatta

SEQ ID NO: 54123 - DNA, 20 bp, synthetic construct
  misc_feature 1..20: note = chemically synthesized
  source 1..20: mol_type = other DNA
tcctaaaatattgggattac

SEQ ID NO: 54124 - DNA, 20 bp, synthetic construct
  misc_feature 1..20: note = chemically synthesized
  source 1..20: mol_type = other DNA
aatattgggattacaggcat

SEQ ID NO: 54125 - DNA, 20 bp, synthetic construct
  misc_feature 1..20: note = chemically synthesized
  source 1..20: mol_type = other DNA
acaggcatgagccaccgcgc

SEQ ID NO: 54126 - DNA, 20 bp, synthetic construct
  misc_feature 1..20: note = chemically synthesized
  source 1..20: mol_type = other DNA
gcaaatccttaattatcaaa

SEQ ID NO: 54127 - DNA, 20 bp, synthetic construct
  misc_feature 1..20: note = chemically synthesized
  source 1..20: mol_type = other DNA
taattatcaaacagataaaa

SEQ ID NO: 54128 - DNA, 20 bp, synthetic construct
  misc_feature 1..20: note = chemically synthesized
  source 1..20: mol_type = other DNA
aattatcaaacagataaaat

SEQ ID NO: 54129 - DNA, 20 bp, synthetic construct
  misc_feature 1..20: note = chemically synthesized
  source 1..20: mol_type = other DNA
attatcaaacagataaaata

SEQ ID NO: 54130 - DNA, 20 bp, synthetic construct
  misc_feature 1..20: note = chemically synthesized
  source 1..20: mol_type = other DNA
atcaaacagataaaataggg

SEQ ID NO: 54131 - DNA, 20 bp, synthetic construct
  misc_feature 1..20: note = chemically synthesized
  source 1..20: mol_type = other DNA
aagttaaaattcatatacac

SEQ ID NO: 54132 - DNA, 20 bp, synthetic construct
  misc_feature 1..20: note = chemically synthesized
  source 1..20: mol_type = other DNA
agttaaaattcatatacaca

SEQ ID NO: 54133 - DNA, 20 bp, synthetic construct
  misc_feature 1..20: note = chemically synthesized
  source 1..20: mol_type = other DNA
gttaaaattcatatacacaa

SEQ ID NO: 54134 - DNA, 20 bp, synthetic construct
  misc_feature 1..20: note = chemically synthesized
  source 1..20: mol_type = other DNA
caagggttaaccacttgcca

SEQ ID NO: 54135 - DNA, 20 bp, synthetic construct
  misc_feature 1..20: note = chemically synthesized
  source 1..20: mol_type = other DNA
aagggttaaccacttgccac

SEQ ID NO: 54136 - DNA, 20 bp, synthetic construct
  misc_feature 1..20: note = chemically synthesized
  source 1..20: mol_type = other DNA
ggcatttttttttttttttt

SEQ ID NO: 54137 - DNA, 20 bp, synthetic construct
  misc_feature 1..20: note = chemically synthesized
  source 1..20: mol_type = other DNA
ttttttttttttttttgaga

SEQ ID NO: 54138 - DNA, 20 bp, synthetic construct
  misc_feature 1..20: note = chemically synthesized
  source 1..20: mol_type = other DNA
cggaatctcgctctgttgcc

SEQ ID NO: 54139 - DNA, 20 bp, synthetic construct
  misc_feature 1..20: note = chemically synthesized
  source 1..20: mol_type = other DNA
ggaatctcgctctgttgccc

SEQ ID NO: 54140 - DNA, 20 bp, synthetic construct
  misc_feature 1..20: note = chemically synthesized
  source 1..20: mol_type = other DNA
tctcgctctgttgcccaggc

SEQ ID NO: 54141 - DNA, 20 bp, synthetic construct
  misc_feature 1..20: note = chemically synthesized
  source 1..20: mol_type = other DNA
tcgctctgttgcccaggctg

SEQ ID NO: 54142 - DNA, 20 bp, synthetic construct
  misc_feature 1..20: note = chemically synthesized
  source 1..20: mol_type = other DNA
ctgttgcccaggctggagtg

SEQ ID NO: 54143 - DNA, 20 bp, synthetic construct
  misc_feature 1..20: note = chemically synthesized
  source 1..20: mol_type = other DNA
ttgcccaggctggagtgcag

SEQ ID NO: 54144 - DNA, 20 bp, synthetic construct
  misc_feature 1..20: note = chemically synthesized
  source 1..20: mol_type = other DNA
tcactgcaacctccgcttcc

SEQ ID NO: 54145 - DNA, 20 bp, synthetic construct
  misc_feature 1..20: note = chemically synthesized
  source 1..20: mol_type = other DNA
cactgcaacctccgcttcct

SEQ ID NO: 54146 - DNA, 20 bp, synthetic construct
  misc_feature 1..20: note = chemically synthesized
  source 1..20: mol_type = other DNA
aacctccgcttcctgggttc

SEQ ID NO: 54147 - DNA, 20 bp, synthetic construct
  misc_feature 1..20: note = chemically synthesized
  source 1..20: mol_type = other DNA
ttcaagctattcttctgcct

SEQ ID NO: 54148 - DNA, 20 bp, synthetic construct
  misc_feature 1..20: note = chemically synthesized
  source 1..20: mol_type = other DNA
ttcttctgcctcagcctacc

SEQ ID NO: 54149 - DNA, 20 bp, synthetic construct
  misc_feature 1..20: note = chemically synthesized
  source 1..20: mol_type = other DNA
ttctgcctcagcctaccgag

SEQ ID NO: 54150 - DNA, 20 bp, synthetic construct
  misc_feature 1..20: note = chemically synthesized
  source 1..20: mol_type = other DNA
gcctcagcctaccgagtagc

SEQ ID NO: 54151 - DNA, 20 bp, synthetic construct
  misc_feature 1..20: note = chemically synthesized
  source 1..20: mol_type = other DNA
cctcagcctaccgagtagct

SEQ ID NO: 54152 - DNA, 20 bp, synthetic construct
  misc_feature 1..20: note = chemically synthesized
  source 1..20: mol_type = other DNA
ctaccgagtagctgggacta

SEQ ID NO: 54153 - DNA, 20 bp, synthetic construct
  misc_feature 1..20: note = chemically synthesized
  source 1..20: mol_type = other DNA
taccgagtagctgggactac

SEQ ID NO: 54154 - DNA, 20 bp, synthetic construct
  misc_feature 1..20: note = chemically synthesized
  source 1..20: mol_type = other DNA
caggcacgtgccaccacacc

SEQ ID NO: 54155 - DNA, 20 bp, synthetic construct
  misc_feature 1..20: note = chemically synthesized
  source 1..20: mol_type = other DNA
ctggctaatttttttatttt

SEQ ID NO: 54156 - DNA, 20 bp, synthetic construct
  misc_feature 1..20: note = chemically synthesized
  source 1..20: mol_type = other DNA
gctaatttttttatttttag

SEQ ID NO: 54157 - DNA, 20 bp, synthetic construct
  misc_feature 1..20: note = chemically synthesized
  source 1..20: mol_type = other DNA
taatttttttatttttagta

SEQ ID NO: 54158 - DNA, 20 bp, synthetic construct
  misc_feature 1..20: note = chemically synthesized
  source 1..20: mol_type = other DNA
ttttttatttttagtagaga

SEQ ID NO: 54159 - DNA, 20 bp, synthetic construct
  misc_feature 1..20: note = chemically synthesized
  source 1..20: mol_type = other DNA
tttttatttttagtagagat

SEQ ID NO: 54160 - DNA, 20 bp, synthetic construct
  misc_feature 1..20: note = chemically synthesized
  source 1..20: mol_type = other DNA
ttttatttttagtagagatg

SEQ ID NO: 54161 - DNA, 20 bp, synthetic construct
  misc_feature 1..20: note = chemically synthesized
  source 1..20: mol_type = other DNA
gagatggggtttcaccatat

SEQ ID NO: 54162 - DNA, 20 bp, synthetic construct
  misc_feature 1..20: note = chemically synthesized
  source 1..20: mol_type = other DNA
tggggtttcaccatattggc

SEQ ID NO: 54163 - DNA, 20 bp, synthetic construct
  misc_feature 1..20: note = chemically synthesized
  source 1..20: mol_type = other DNA
ggggtttcaccatattggcc

SEQ ID NO: 54164 - DNA, 20 bp, synthetic construct
  misc_feature 1..20: note = chemically synthesized
  source 1..20: mol_type = other DNA
tttcaccatattggccaggc

SEQ ID NO: 54165 - DNA, 20 bp, synthetic construct
  misc_feature 1..20: note = chemically synthesized
  source 1..20: mol_type = other DNA
ctggtcttgaactcctgacc

SEQ ID NO: 54166 - DNA, 20 bp, synthetic construct
  misc_feature 1..20: note = chemically synthesized
  source 1..20: mol_type = other DNA
acctagtgatccatccgcct

SEQ ID NO: 54167 - DNA, 20 bp, synthetic construct
  misc_feature 1..20: note = chemically synthesized
  source 1..20: mol_type = other DNA
ccatccgcctcagcctccca

SEQ ID NO: 54168 - DNA, 20 bp, synthetic construct
  misc_feature 1..20: note = chemically synthesized
  source 1..20: mol_type = other DNA
gcctcagcctcccaaagtgc

SEQ ID NO: 54169 - DNA, 20 bp, synthetic construct
  misc_feature 1..20: note = chemically synthesized
  source 1..20: mol_type = other DNA
cctcagcctcccaaagtgct

SEQ ID NO: 54170 - DNA, 20 bp, synthetic construct
  misc_feature 1..20: note = chemically synthesized
  source 1..20: mol_type = other DNA
ctcccaaagtgctgggattg

SEQ ID NO: 54171 - DNA, 20 bp, synthetic construct
  misc_feature 1..20: note = chemically synthesized
  source 1..20: mol_type = other DNA
tcccaaagtgctgggattgc

SEQ ID NO: 54172 - DNA, 20 bp, synthetic construct
  misc_feature 1..20: note = chemically synthesized
  source 1..20: mol_type = other DNA
agtgctgggattgcaggcat

SEQ ID NO: 54173 - DNA, 20 bp, synthetic construct
  misc_feature 1..20: note = chemically synthesized
  source 1..20: mol_type = other DNA
caggcatgagccaccgcgcc

SEQ ID NO: 54174 - DNA, 20 bp, synthetic construct
  misc_feature 1..20: note = chemically synthesized
  source 1..20: mol_type = other DNA
ggcctttttttttttttttt

SEQ ID NO: 54175 - DNA, 20 bp, synthetic construct
  misc_feature 1..20: note = chemically synthesized
  source 1..20: mol_type = other DNA
ttttttttttttttttgaga

SEQ ID NO: 54176 - DNA, 20 bp, synthetic construct
  misc_feature 1..20: note = chemically synthesized
  source 1..20: mol_type = other DNA
ttttttttttttttgagacg

SEQ ID NO: 54177 - DNA, 20 bp, synthetic construct
  misc_feature 1..20: note = chemically synthesized
  source 1..20: mol_type = other DNA
ggagttttgctcttgttgcc

SEQ ID NO: 54178 - DNA, 20 bp, synthetic construct
  misc_feature 1..20: note = chemically synthesized
  source 1..20: mol_type = other DNA
gagttttgctcttgttgccc

SEQ ID NO: 54179 - DNA, 20 bp, synthetic construct
  misc_feature 1..20: note = chemically synthesized
  source 1..20: mol_type = other DNA
tttgctcttgttgcccaggc

SEQ ID NO: 54180 - DNA, 20 bp, synthetic construct
  misc_feature 1..20: note = chemically synthesized
  source 1..20: mol_type = other DNA
tgctcttgttgcccaggcta

SEQ ID NO: 54181 - DNA, 20 bp, synthetic construct
  misc_feature 1..20: note = chemically synthesized
  source 1..20: mol_type = other DNA
ttgttgcccaggctagagtg

SEQ ID NO: 54182 - DNA, 20 bp, synthetic construct
  misc_feature 1..20: note = chemically synthesized
  source 1..20: mol_type = other DNA
ttgcccaggctagagtgcag

SEQ ID NO: 54183 - DNA, 20 bp, synthetic construct
  misc_feature 1..20: note = chemically synthesized
  source 1..20: mol_type = other DNA
caggctagagtgcagtggcg

SEQ ID NO: 54184 - DNA, 20 bp, synthetic construct
  misc_feature 1..20: note = chemically synthesized
  source 1..20: mol_type = other DNA
agagtgcagtggcgcagtct

SEQ ID NO: 54185 - DNA, 20 bp, synthetic construct
  misc_feature 1..20: note = chemically synthesized
  source 1..20: mol_type = other DNA
cactgtaacctccacctcct

SEQ ID NO: 54186 - DNA, 20 bp, synthetic construct
  misc_feature 1..20: note = chemically synthesized
  source 1..20: mol_type = other DNA
aacctccacctcctgagttc

SEQ ID NO: 54187 - DNA, 20 bp, synthetic construct
  misc_feature 1..20: note = chemically synthesized
  source 1..20: mol_type = other DNA
ttcaagcaattctcctgcct

SEQ ID NO: 54188 - DNA, 20 bp, synthetic construct
  misc_feature 1..20: note = chemically synthesized
  source 1..20: mol_type = other DNA
tcctgcctcagcctctcaaa

SEQ ID NO: 54189 - DNA, 20 bp, synthetic construct
  misc_feature 1..20: note = chemically synthesized
  source 1..20: mol_type = other DNA
gcctcagcctctcaaatagc

SEQ ID NO: 54190 - DNA, 20 bp, synthetic construct
  misc_feature 1..20: note = chemically synthesized
  source 1..20: mol_type = other DNA
cctcagcctctcaaatagct

SEQ ID NO: 54191 - DNA, 20 bp, synthetic construct
  misc_feature 1..20: note = chemically synthesized
  source 1..20: mol_type = other DNA
ctctcaaatagctgggatta

SEQ ID NO: 54192 - DNA, 20 bp, synthetic construct
  misc_feature 1..20: note = chemically synthesized
  source 1..20: mol_type = other DNA
tctcaaatagctgggattac

SEQ ID NO: 54193 - DNA, 20 bp, synthetic construct
  misc_feature 1..20: note = chemically synthesized
  source 1..20: mol_type = other DNA
atagctgggattacaggcgt

SEQ ID NO: 54194 - DNA, 20 bp, synthetic construct
  misc_feature 1..20: note = chemically synthesized
  source 1..20: mol_type = other DNA
caggcgtgagccaccccacc

SEQ ID NO: 54195 - DNA, 20 bp, synthetic construct
  misc_feature 1..20: note = chemically synthesized
  source 1..20: mol_type = other DNA
taattttgtaattttttttt

SEQ ID NO: 54196 - DNA, 20 bp, synthetic construct
  misc_feature 1..20: note = chemically synthesized
  source 1..20: mol_type = other DNA
ttttgtaattttttttttag

SEQ ID NO: 54197 - DNA, 20 bp, synthetic construct
  misc_feature 1..20: note = chemically synthesized
  source 1..20: mol_type = other DNA
ttgtaattttttttttagta

SEQ ID NO: 54198 - DNA, 20 bp, synthetic construct
  misc_feature 1..20: note = chemically synthesized
  source 1..20: mol_type = other DNA
aattttttttttagtagaga

SEQ ID NO: 54199 - DNA, 20 bp, synthetic construct
  misc_feature 1..20: note = chemically synthesized
  source 1..20: mol_type = other DNA
attttttttttagtagagat

SEQ ID NO: 54200 - DNA, 20 bp, synthetic construct
  misc_feature 1..20: note = chemically synthesized
  source 1..20: mol_type = other DNA
ttttttttttagtagagatg

SEQ ID NO: 54201 - DNA, 20 bp, synthetic construct
  misc_feature 1..20: note = chemically synthesized
  source 1..20: mol_type = other DNA
atggggtttcacctgttgat

SEQ ID NO: 54202 - DNA, 20 bp, synthetic construct
  misc_feature 1..20: note = chemically synthesized
  source 1..20: mol_type = other DNA
tggggtttcacctgttgatc

SEQ ID NO: 54203 - DNA, 20 bp, synthetic construct
  misc_feature 1..20: note = chemically synthesized
  source 1..20: mol_type = other DNA
gtttcacctgttgatcaggc

SEQ ID NO: 54204 - DNA, 20 bp, synthetic construct
  misc_feature 1..20: note = chemically synthesized
  source 1..20: mol_type = other DNA
ggtctcaaactcctgacctc

SEQ ID NO: 54205 - DNA, 20 bp, synthetic construct
  misc_feature 1..20: note = chemically synthesized
  source 1..20: mol_type = other DNA
ctcaagtgatccacccacct

SEQ ID NO: 54206 - DNA, 20 bp, synthetic construct
  misc_feature 1..20: note = chemically synthesized
  source 1..20: mol_type = other DNA
ccacccacctcggcctccca

SEQ ID NO: 54207 - DNA, 20 bp, synthetic construct
  misc_feature 1..20: note = chemically synthesized
  source 1..20: mol_type = other DNA
acctcggcctcccaaagtgc

SEQ ID NO: 54208 - DNA, 20 bp, synthetic construct
  misc_feature 1..20: note = chemically synthesized
  source 1..20: mol_type = other DNA
cctcggcctcccaaagtgct

SEQ ID NO: 54209 - DNA, 20 bp, synthetic construct
  misc_feature 1..20: note = chemically synthesized
  source 1..20: mol_type = other DNA
tcccaaagtgctgggattac

SEQ ID NO: 54210 - DNA, 20 bp, synthetic construct
  misc_feature 1..20: note = chemically synthesized
  source 1..20: mol_type = other DNA
agtgctgggattacaagcat

SEQ ID NO: 54211 - DNA, 20 bp, synthetic construct
  misc_feature 1..20: note = chemically synthesized
  source 1..20: mol_type = other DNA
caagcataagccaccgtgcc

SEQ ID NO: 54212 - DNA, 20 bp, synthetic construct
  misc_feature 1..20: note = chemically synthesized
  source 1..20: mol_type = other DNA
gtcaattttgatctttttta

SEQ ID NO: 54213 - DNA, 20 bp, synthetic construct
  misc_feature 1..20: note = chemically synthesized
  source 1..20: mol_type = other DNA
caattttgatcttttttaaa

SEQ ID NO: 54214 - DNA, 20 bp, synthetic construct
  misc_feature 1..20: note = chemically synthesized
  source 1..20: mol_type = other DNA
tttgatcttttttaaagaga

SEQ ID NO: 54215 - DNA, 20 bp, synthetic construct
  misc_feature 1..20: note = chemically synthesized
  source 1..20: mol_type = other DNA
ttgatcttttttaaagagac

SEQ ID NO: 54216 - DNA, 20 bp, synthetic construct
  misc_feature 1..20: note = chemically synthesized
  source 1..20: mol_type = other DNA
tgatcttttttaaagagaca

SEQ ID NO: 54217 - DNA, 20 bp, synthetic construct
  misc_feature 1..20: note = chemically synthesized
  source 1..20: mol_type = other DNA
gatcttttttaaagagacag

SEQ ID NO: 54218 - DNA, 20 bp, synthetic construct
  misc_feature 1..20: note = chemically synthesized
  source 1..20: mol_type = other DNA
aggggtcttgctatgttgcc

SEQ ID NO: 54219 - DNA, 20 bp, synthetic construct
  misc_feature 1..20: note = chemically synthesized
  source 1..20: mol_type = other DNA
tcttgctatgttgcccagac

SEQ ID NO: 54220 - DNA, 20 bp, synthetic construct
  misc_feature 1..20: note = chemically synthesized
  source 1..20: mol_type = other DNA
ccagactagtcttgaactcc

SEQ ID NO: 54221 - DNA, 20 bp, synthetic construct
  misc_feature 1..20: note = chemically synthesized
  source 1..20: mol_type = other DNA
agtcttgaactcctggcctc

SEQ ID NO: 54222 - DNA, 20 bp, synthetic construct
  misc_feature 1..20: note = chemically synthesized
  source 1..20: mol_type = other DNA
ctcaagtgatcctctcacct

SEQ ID NO: 54223 - DNA, 20 bp, synthetic construct
  misc_feature 1..20: note = chemically synthesized
  source 1..20: mol_type = other DNA
cctctcacctcggcctccca

SEQ ID NO: 54224 - DNA, 20 bp, synthetic construct
  misc_feature 1..20: note = chemically synthesized
  source 1..20: mol_type = other DNA
acctcggcctcccaaagtat

SEQ ID NO: 54225 - DNA, 20 bp, synthetic construct
  misc_feature 1..20: note = chemically synthesized
  source 1..20: mol_type = other DNA
cctcggcctcccaaagtatt

SEQ ID NO: 54226 - DNA, 20 bp, synthetic construct
  misc_feature 1..20: note = chemically synthesized
  source 1..20: mol_type = other DNA
ctcccaaagtattgggatta

SEQ ID NO: 54227 - DNA, 20 bp, synthetic construct
  misc_feature 1..20: note = chemically synthesized
  source 1..20: mol_type = other DNA
tcccaaagtattgggattac

SEQ ID NO: 54228 - DNA, 20 bp, synthetic construct
  misc_feature 1..20: note = chemically synthesized
  source 1..20: mol_type = other DNA
agtattgggattacaggtct

SEQ ID NO: 54229 - DNA, 20 bp, synthetic construct
  misc_feature 1..20: note = chemically synthesized
  source 1..20: mol_type = other DNA
caggtctgagccgctgcacc

SEQ ID NO: 54230 - DNA, 20 bp, synthetic construct
  misc_feature 1..20: note = chemically synthesized
  source 1..20: mol_type = other DNA
ccgctgcacccagcccccaa

SEQ ID NO: 54231 - DNA, 20 bp, synthetic construct
  misc_feature 1..20: note = chemically synthesized
  source 1..20: mol_type = other DNA
cgctgcacccagcccccaac

SEQ ID NO: 54232 - DNA, 20 bp, synthetic construct
  misc_feature 1..20: note = chemically synthesized
  source 1..20: mol_type = other DNA
cagcccccaacaggcatctt

SEQ ID NO: 54233 - DNA, 20 bp, synthetic construct
  misc_feature 1..20: note = chemically synthesized
  source 1..20: mol_type = other DNA
acaggcatctttggactttt

SEQ ID NO: 54234 - DNA, 20 bp, synthetic construct
  misc_feature 1..20: note = chemically synthesized
  source 1..20: mol_type = other DNA
atctttggacttttgagtac

SEQ ID NO: 54235 - DNA, 20 bp, synthetic construct
  misc_feature 1..20: note = chemically synthesized
  source 1..20: mol_type = other DNA
taatttacaaaaattccact

SEQ ID NO: 54236 - DNA, 20 bp, synthetic construct
  misc_feature 1..20: note = chemically synthesized
  source 1..20: mol_type = other DNA
atttacaaaaattccactga

SEQ ID NO: 54237 - DNA, 20 bp, synthetic construct
  misc_feature 1..20: note = chemically synthesized
  source 1..20: mol_type = other DNA
aaattccactgagagcacct

SEQ ID NO: 54238 - DNA, 20 bp, synthetic construct
  misc_feature 1..20: note = chemically synthesized
  source 1..20: mol_type = other DNA
ctgagagcacctaagtttgc

SEQ ID NO: 54239 - DNA, 20 bp, synthetic construct
  misc_feature 1..20: note = chemically synthesized
  source 1..20: mol_type = other DNA
tgagagcacctaagtttgcc

SEQ ID NO: 54240 - DNA, 20 bp, synthetic construct
  misc_feature 1..20: note = chemically synthesized
  source 1..20: mol_type = other DNA
gccaggctccaacatttctg

SEQ ID NO: 54241 - DNA, 20 bp, synthetic construct
  misc_feature 1..20: note = chemically synthesized
  source 1..20: mol_type = other DNA
ccaggctccaacatttctgc

SEQ ID NO: 54242 - DNA, 20 bp, synthetic construct
  misc_feature 1..20: note = chemically synthesized
  source 1..20: mol_type = other DNA
caggctccaacatttctgca

SEQ ID NO: 54243 - DNA, 20 bp, synthetic construct
  misc_feature 1..20: note = chemically synthesized
  source 1..20: mol_type = other DNA
aggctccaacatttctgcag

SEQ ID NO: 54244 - DNA, 20 bp, synthetic construct
  misc_feature 1..20: note = chemically synthesized
  source 1..20: mol_type = other DNA
aggggctgttttctttgctg

SEQ ID NO: 54245 - DNA, 20 bp, synthetic construct
  misc_feature 1..20: note = chemically synthesized
  source 1..20: mol_type = other DNA
ggggctgttttctttgctga

SEQ ID NO: 54246 - DNA, 20 bp, synthetic construct
  misc_feature 1..20: note = chemically synthesized
  source 1..20: mol_type = other DNA
tctgcacctgtgttctgtta

SEQ ID NO: 54247 - DNA, 20 bp, synthetic construct
  misc_feature 1..20: note = chemically synthesized
  source 1..20: mol_type = other DNA
tatggttgcctcttctgttg

SEQ ID NO: 54248 - DNA, 20 bp, synthetic construct
  misc_feature 1..20: note = chemically synthesized
  source 1..20: mol_type = other DNA
atggttgcctcttctgttgc

SEQ ID NO: 54249 - DNA, 20 bp, synthetic construct
  misc_feature 1..20: note = chemically synthesized
  source 1..20: mol_type = other DNA
ggtgcttgaatgtcattttg

SEQ ID NO: 54250 - DNA, 20 bp, synthetic construct
  misc_feature 1..20: note = chemically synthesized
  source 1..20: mol_type = other DNA
cttgaatgtcattttgtggt

SEQ ID NO: 54251 - DNA, 20 bp, synthetic construct
  misc_feature 1..20: note = chemically synthesized
  source 1..20: mol_type = other DNA
ttgaatgtcattttgtggtt

SEQ ID NO: 54252 - DNA, 20 bp, synthetic construct
  misc_feature 1..20: note = chemically synthesized
  source 1..20: mol_type = other DNA
tcattttgtggttgggattc

SEQ ID NO: 54253 - DNA, 20 bp, synthetic construct
  misc_feature 1..20: note = chemically synthesized
  source 1..20: mol_type = other DNA
cattttgtggttgggattct

SEQ ID NO: 54254 - DNA, 20 bp, synthetic construct
  misc_feature 1..20: note = chemically synthesized
  source 1..20: mol_type = other DNA
ggttgggattctgggctgtg

SEQ ID NO: 54255 - DNA, 20 bp, synthetic construct
  misc_feature 1..20: note = chemically synthesized
  source 1..20: mol_type = other DNA
tgctgctcattttcctcatc

SEQ ID NO: 54256 - DNA, 20 bp, synthetic construct
  misc_feature 1..20: note = chemically synthesized
  source 1..20: mol_type = other DNA
tttcctcatcaagttgttgc

SEQ ID NO: 54257 - DNA, 20 bp, synthetic construct
  misc_feature 1..20: note = chemically synthesized
  source 1..20: mol_type = other DNA
tcctcatcaagttgttgctg

SEQ ID NO: 54258 - DNA, 20 bp, synthetic construct
  misc_feature 1..20: note = chemically synthesized
  source 1..20: mol_type = other DNA
agttgttgctggagtcctgt

SEQ ID NO: 54259 - DNA, 20 bp, synthetic construct
  misc_feature 1..20: note = chemically synthesized
  source 1..20: mol_type = other DNA
gttgttgctggagtcctgtc

SEQ ID NO: 54260 - DNA, 20 bp, synthetic construct
  misc_feature 1..20: note = chemically synthesized
  source 1..20: mol_type = other DNA
tgctggagtcctgtcaggta

SEQ ID NO: 54261 - DNA, 20 bp, synthetic construct
  misc_feature 1..20: note = chemically synthesized
  source 1..20: mol_type = other DNA
gctggagtcctgtcaggtat

SEQ ID NO: 54262 - DNA, 20 bp, synthetic construct
  misc_feature 1..20: note = chemically synthesized
  source 1..20: mol_type = other DNA
attccgtttctctccctaat

SEQ ID NO: 54263 - DNA, 20 bp, synthetic construct
  misc_feature 1..20: note = chemically synthesized
  source 1..20: mol_type = other DNA
ttccgtttctctccctaatc

SEQ ID NO: 54264 - DNA, 20 bp, synthetic construct
  misc_feature 1..20: note = chemically synthesized
  source 1..20: mol_type = other DNA
ccctaatcaggacaaaatcc

SEQ ID NO: 54265 - DNA, 20 bp, synthetic construct
  misc_feature 1..20: note = chemically synthesized
  source 1..20: mol_type = other DNA
aggacaaaatcccagcattc

SEQ ID NO: 54266 - DNA, 20 bp, synthetic construct
  misc_feature 1..20: note = chemically synthesized
  source 1..20: mol_type = other DNA
agccacatcctgtgtgtaat

SEQ ID NO: 54267 - DNA, 20 bp, synthetic construct
  misc_feature 1..20: note = chemically synthesized
  source 1..20: mol_type = other DNA
ctgtgtgtaatcagtactgt

SEQ ID NO: 54268 - DNA, 20 bp, synthetic construct
  misc_feature 1..20: note = chemically synthesized
  source 1..20: mol_type = other DNA
cagtactgttagcatttctg

SEQ ID NO: 54269 - DNA, 20 bp, synthetic construct
  misc_feature 1..20: note = chemically synthesized
  source 1..20: mol_type = other DNA
agtactgttagcatttctgt

SEQ ID NO: 54270 - DNA, 20 bp, synthetic construct
  misc_feature 1..20: note = chemically synthesized
  source 1..20: mol_type = other DNA
ttagcatttctgtgggttga

SEQ ID NO: 54271 - DNA, 20 bp, synthetic construct
  misc_feature 1..20: note = chemically synthesized
  source 1..20: mol_type = other DNA
atttctgtgggttgaaagtc

SEQ ID NO: 54272 - DNA, 20 bp, synthetic construct
  misc_feature 1..20: note = chemically synthesized
  source 1..20: mol_type = other DNA
gtgggttgaaagtcaagaat

SEQ ID NO: 54273 - DNA, 20 bp, synthetic construct
  misc_feature 1..20: note = chemically synthesized
  source 1..20: mol_type = other DNA
ttgaaatgattaatttctat

SEQ ID NO: 54274 - DNA, 20 bp, synthetic construct
  misc_feature 1..20: note = chemically synthesized
  source 1..20: mol_type = other DNA
gaaatgattaatttctataa

SEQ ID NO: 54275 - DNA, 20 bp, synthetic construct
  misc_feature 1..20: note = chemically synthesized
  source 1..20: mol_type = other DNA
ttaatttctataagagtgcc

SEQ ID NO: 54276 - DNA, 20 bp, synthetic construct
  misc_feature 1..20: note = chemically synthesized
  source 1..20: mol_type = other DNA
tataagagtgcccagatcta

SEQ ID NO: 54277 - DNA, 20 bp, synthetic construct
  misc_feature 1..20: note = chemically synthesized
  source 1..20: mol_type = other DNA
gatctatagaatgaattgtg

SEQ ID NO: 54278 - DNA, 20 bp, synthetic construct
  misc_feature 1..20: note = chemically synthesized
  source 1..20: mol_type = other DNA
ctatagaatgaattgtgtag

SEQ ID NO: 54279 - DNA, 20 bp, synthetic construct
  misc_feature 1..20: note = chemically synthesized
  source 1..20: mol_type = other DNA
attaacgcaccaaattgaat

SEQ ID NO: 54280 - DNA, 20 bp, synthetic construct
  misc_feature 1..20: note = chemically synthesized
  source 1..20: mol_type = other DNA
attgaattagcttgaaatct

SEQ ID NO: 54281 - DNA, 20 bp, synthetic construct
  misc_feature 1..20: note = chemically synthesized
  source 1..20: mol_type = other DNA
tgaattagcttgaaatctca

SEQ ID NO: 54282 - DNA, 20 bp, synthetic construct
  misc_feature 1..20: note = chemically synthesized
  source 1..20: mol_type = other DNA
ttacaatctttatttcttac

SEQ ID NO: 54283 - DNA, 20 bp, synthetic construct
  misc_feature 1..20: note = chemically synthesized
  source 1..20: mol_type = other DNA
tatttcttactggtcttcaa

SEQ ID NO: 54284 - DNA, 20 bp, synthetic construct
  misc_feature 1..20: note = chemically synthesized
  source 1..20: mol_type = other DNA
atttcttactggtcttcaac

SEQ ID NO: 54285 - DNA, 20 bp, synthetic construct
  misc_feature 1..20: note = chemically synthesized
  source 1..20: mol_type = other DNA
acaggccctaatttactttt

SEQ ID NO: 54286 - DNA, 20 bp, synthetic construct
  misc_feature 1..20: note = chemically synthesized
  source 1..20: mol_type = other DNA
caggccctaatttacttttc

SEQ ID NO: 54287 - DNA, 20 bp, synthetic construct
  misc_feature 1..20: note = chemically synthesized
  source 1..20: mol_type = other DNA
aggccctaatttacttttca

SEQ ID NO: 54288 - DNA, 20 bp, synthetic construct
  misc_feature 1..20: note = chemically synthesized
  source 1..20: mol_type = other DNA
aacaaattaacacgatgtcc

SEQ ID NO: 54289 - DNA, 20 bp, synthetic construct
  misc_feature 1..20: note = chemically synthesized
  source 1..20: mol_type = other DNA
acaaattaacacgatgtcct

SEQ ID NO: 54290 - DNA, 20 bp, synthetic construct
  misc_feature 1..20: note = chemically synthesized
  source 1..20: mol_type = other DNA
attaacacgatgtcctagga

SEQ ID NO: 54291 - DNA, 20 bp, synthetic construct
  misc_feature 1..20: note = chemically synthesized
  source 1..20: mol_type = other DNA
acattcatttgcaaacctaa

SEQ ID NO: 54292 - DNA, 20 bp, synthetic construct
  misc_feature 1..20: note = chemically synthesized
  source 1..20: mol_type = other DNA
gcaaacctaatagataactg

SEQ ID NO: 54293 - DNA, 20 bp, synthetic construct
  misc_feature 1..20: note = chemically synthesized
  source 1..20: mol_type = other DNA
actgcagttgatctctttta

SEQ ID NO: 54294 - DNA, 20 bp, synthetic construct
  misc_feature 1..20: note = chemically synthesized
  source 1..20: mol_type = other DNA
ctgcagttgatctcttttat

SEQ ID NO: 54295 - DNA, 20 bp, synthetic construct
  misc_feature 1..20: note = chemically synthesized
  source 1..20: mol_type = other DNA
gttgatctcttttataggtt

SEQ ID NO: 54296 - DNA, 20 bp, synthetic construct
  misc_feature 1..20: note = chemically synthesized
  source 1..20: mol_type = other DNA
tgatctcttttataggttca

SEQ ID NO: 54297 - DNA, 20 bp, synthetic construct
  misc_feature 1..20: note = chemically synthesized
  source 1..20: mol_type = other DNA
tttttttgtttttttttttt

SEQ ID NO: 54298 - DNA, 20 bp, synthetic construct
  misc_feature 1..20: note = chemically synthesized
  source 1..20: mol_type = other DNA
tttgttttttttttttgaga

SEQ ID NO: 54299 - DNA, 20 bp, synthetic construct
  misc_feature 1..20: note = chemically synthesized
  source 1..20: mol_type = other DNA
tgttttttttttttgagatg

SEQ ID NO: 54300 - DNA, 20 bp, synthetic construct
  misc_feature 1..20: note = chemically synthesized
  source 1..20: mol_type = other DNA
tggagtctcgctctgtgacc

SEQ ID NO: 54301 - DNA, 20 bp, synthetic construct
  misc_feature 1..20: note = chemically synthesized
  source 1..20: mol_type = other DNA
ggagtctcgctctgtgaccc

SEQ ID NO: 54302 - DNA, 20 bp, synthetic construct
  misc_feature 1..20: note = chemically synthesized
  source 1..20: mol_type = other DNA
tctcgctctgtgacccaggc

SEQ ID NO: 54303 - DNA, 20 bp, synthetic construct
  misc_feature 1..20: note = chemically synthesized
  source 1..20: mol_type = other DNA
tcgctctgtgacccaggcta

SEQ ID NO: 54304 - DNA, 20 bp, synthetic construct
  misc_feature 1..20: note = chemically synthesized
  source 1..20: mol_type = other DNA
ctgtgacccaggctagagtg

SEQ ID NO: 54305 - DNA, 20 bp, synthetic construct
  misc_feature 1..20: note = chemically synthesized
  source 1..20: mol_type = other DNA
tgacccaggctagagtgcag

SEQ ID NO: 54306 - DNA, 20 bp, synthetic construct
  misc_feature 1..20: note = chemically synthesized
  source 1..20: mol_type = other DNA
agagtgcagtggtgcgatct

SEQ ID NO: 54307 - DNA, 20 bp, synthetic construct
  misc_feature 1..20: note = chemically synthesized
  source 1..20: mol_type = other DNA
gtgcgatctcggctcactgc

SEQ ID NO: 54308 - DNA, 20 bp, synthetic construct
  misc_feature 1..20: note = chemically synthesized
  source 1..20: mol_type = other DNA
tcactgcaagctccacctcc

SEQ ID NO: 54309 - DNA, 20 bp, synthetic construct
  misc_feature 1..20: note = chemically synthesized
  source 1..20: mol_type = other DNA
cactgcaagctccacctcct

SEQ ID NO: 54310 - DNA, 20 bp, synthetic construct
  misc_feature 1..20: note = chemically synthesized
  source 1..20: mol_type = other DNA
ttcacgccattctcctgcct

SEQ ID NO: 54311 - DNA, 20 bp, synthetic construct
  misc_feature 1..20: note = chemically synthesized
  source 1..20: mol_type = other DNA
tctcctgcctcagcctctcc

SEQ ID NO: 54312 - DNA, 20 bp, synthetic construct
  misc_feature 1..20: note = chemically synthesized
  source 1..20: mol_type = other DNA
cctgcctcagcctctccgag

SEQ ID NO: 54313 - DNA, 20 bp, synthetic construct
  misc_feature 1..20: note = chemically synthesized
  source 1..20: mol_type = other DNA
cctcagcctctccgagtagc

SEQ ID NO: 54314 - DNA, 20 bp, synthetic construct
  misc_feature 1..20: note = chemically synthesized
  source 1..20: mol_type = other DNA
ctcagcctctccgagtagct

SEQ ID NO: 54315 - DNA, 20 bp, synthetic construct
  misc_feature 1..20: note = chemically synthesized
  source 1..20: mol_type = other DNA
tctccgagtagctgggacta

SEQ ID NO: 54316 - DNA, 20 bp, synthetic construct
  misc_feature 1..20: note = chemically synthesized
  source 1..20: mol_type = other DNA
ctccgagtagctgggactac

SEQ ID NO: 54317 - DNA, 20 bp, synthetic construct
  misc_feature 1..20: note = chemically synthesized
  source 1..20: mol_type = other DNA
caggcgcccgccaccatgcc

SEQ ID NO: 54318 - DNA, 20 bp, synthetic construct
  misc_feature 1..20: note = chemically synthesized
  source 1..20: mol_type = other DNA
cggctaattttttgtatttt

SEQ ID NO: 54319 - DNA, 20 bp, synthetic construct
  misc_feature 1..20: note = chemically synthesized
  source 1..20: mol_type = other DNA
ctaattttttgtatttttag

SEQ ID NO: 54320 - DNA, 20 bp, synthetic construct
  misc_feature 1..20: note = chemically synthesized
  source 1..20: mol_type = other DNA
aattttttgtatttttagca

SEQ ID NO: 54321 - DNA, 20 bp, synthetic construct
  misc_feature 1..20: note = chemically synthesized
  source 1..20: mol_type = other DNA
ttttgtatttttagcagaga

SEQ ID NO: 54322 - DNA, 20 bp, synthetic construct
  misc_feature 1..20: note = chemically synthesized
  source 1..20: mol_type = other DNA
tttgtatttttagcagagac

SEQ ID NO: 54323 - DNA, 20 bp, synthetic construct
  misc_feature 1..20: note = chemically synthesized
  source 1..20: mol_type = other DNA
ttgtatttttagcagagacg

SEQ ID NO: 54324 - DNA, 20 bp, synthetic construct
  misc_feature 1..20: note = chemically synthesized
  source 1..20: mol_type = other DNA
gcagagacggggtttcaccg

SEQ ID NO: 54325 - DNA, 20 bp, synthetic construct
  misc_feature 1..20: note = chemically synthesized
  source 1..20: mol_type = other DNA
acctcgtgatccgcccgcct

SEQ ID NO: 54326 - DNA, 20 bp, synthetic construct
  misc_feature 1..20: note = chemically synthesized
  source 1..20: mol_type = other DNA
ccgcccgcctcggcctccca

SEQ ID NO: 54327 - DNA, 20 bp, synthetic construct
  misc_feature 1..20: note = chemically synthesized
  source 1..20: mol_type = other DNA
gcctcggcctcccaaagcgc

SEQ ID NO: 54328 - DNA, 20 bp, synthetic construct
  misc_feature 1..20: note = chemically synthesized
  source 1..20: mol_type = other DNA
cctcggcctcccaaagcgct

SEQ ID NO: 54329 - DNA, 20 bp, synthetic construct
  misc_feature 1..20: note = chemically synthesized
  source 1..20: mol_type = other DNA
tcccaaagcgctgggattac

SEQ ID NO: 54330 - DNA, 20 bp, synthetic construct
  misc_feature 1..20: note = chemically synthesized
  source 1..20: mol_type = other DNA
cccaaagcgctgggattaca

SEQ ID NO: 54331 - DNA, 20 bp, synthetic construct
  misc_feature 1..20: note = chemically synthesized
  source 1..20: mol_type = other DNA
ccaaagcgctgggattacaa

SEQ ID NO: 54332 - DNA, 20 bp, synthetic construct
  misc_feature 1..20: note = chemically synthesized
  source 1..20: mol_type = other DNA
agcgctgggattacaagggt

SEQ ID NO: 54333 - DNA, 20 bp, synthetic construct
  misc_feature 1..20: note = chemically synthesized
  source 1..20: mol_type = other DNA
tgcctgaatatgtgttttct

SEQ ID NO: 54334 - DNA, 20 bp, synthetic construct
  misc_feature 1..20: note = chemically synthesized
  source 1..20: mol_type = other DNA
ttttcttagatccaattaac

SEQ ID NO: 54335 - DNA, 20 bp, synthetic construct
  misc_feature 1..20: note = chemically synthesized
  source 1..20: mol_type = other DNA
tttcttagatccaattaaca

SEQ ID NO: 54336 - DNA, 20 bp, synthetic construct
  misc_feature 1..20: note = chemically synthesized
  source 1..20: mol_type = other DNA
ttcttagatccaattaacaa

SEQ ID NO: 54337 - DNA, 20 bp, synthetic construct
  misc_feature 1..20: note = chemically synthesized
  source 1..20: mol_type = other DNA
tagatccaattaacaagggt

SEQ ID NO: 54338 - DNA, 20 bp, synthetic construct
  misc_feature 1..20: note = chemically synthesized
  source 1..20: mol_type = other DNA
ccaattaacaagggtaagac

SEQ ID NO: 54339 - DNA, 20 bp, synthetic construct
  misc_feature 1..20: note = chemically synthesized
  source 1..20: mol_type = other DNA
acaagggtaagacaagattt

SEQ ID NO: 54340 - DNA, 20 bp, synthetic construct
  misc_feature 1..20: note = chemically synthesized
  source 1..20: mol_type = other DNA
ggtaagacaagatttaagtt

SEQ ID NO: 54341 - DNA, 20 bp, synthetic construct
  misc_feature 1..20: note = chemically synthesized
  source 1..20: mol_type = other DNA
acaagatttaagttaagcat

SEQ ID NO: 54342 - DNA, 20 bp, synthetic construct
  misc_feature 1..20: note = chemically synthesized
  source 1..20: mol_type = other DNA
gatttaagttaagcataaga

SEQ ID NO: 54343 - DNA, 20 bp, synthetic construct
  misc_feature 1..20: note = chemically synthesized
  source 1..20: mol_type = other DNA
taagcataagaaagattttg

SEQ ID NO: 54344 - DNA, 20 bp, synthetic construct
  misc_feature 1..20: note = chemically synthesized
  source 1..20: mol_type = other DNA
aagcataagaaagattttgt

SEQ ID NO: 54345 - DNA, 20 bp, synthetic construct
  misc_feature 1..20: note = chemically synthesized
  source 1..20: mol_type = other DNA
gcataagaaagattttgtgg

SEQ ID NO: 54346 - DNA, 20 bp, synthetic construct
  misc_feature 1..20: note = chemically synthesized
  source 1..20: mol_type = other DNA
cataagaaagattttgtggg

SEQ ID NO: 54347 - DNA, 20 bp, synthetic construct
  misc_feature 1..20: note = chemically synthesized
  source 1..20: mol_type = other DNA
aaagattttgtgggaggcac

SEQ ID NO: 54348 - DNA, 20 bp, synthetic construct
  misc_feature 1..20: note = chemically synthesized
  source 1..20: mol_type = other DNA
tgtgggaggcactggaatat

SEQ ID NO: 54349 - DNA, 20 bp, synthetic construct
  misc_feature 1..20: note = chemically synthesized
  source 1..20: mol_type = other DNA
ataagaccttaacaaaactg

SEQ ID NO: 54350 - DNA, 20 bp, synthetic construct
  misc_feature 1..20: note = chemically synthesized
  source 1..20: mol_type = other DNA
aaactgtggaatttctcccc

SEQ ID NO: 54351 - DNA, 20 bp, synthetic construct
  misc_feature 1..20: note = chemically synthesized
  source 1..20: mol_type = other DNA
actgtggaatttctcccctg

SEQ ID NO: 54352 - DNA, 20 bp, synthetic construct
  misc_feature 1..20: note = chemically synthesized
  source 1..20: mol_type = other DNA
tttctcccctggagatttgt

SEQ ID NO: 54353 - DNA, 20 bp, synthetic construct
  misc_feature 1..20: note = chemically synthesized
  source 1..20: mol_type = other DNA
cccctggagatttgtaagaa

SEQ ID NO: 54354 - DNA, 20 bp, synthetic construct
  misc_feature 1..20: note = chemically synthesized
  source 1..20: mol_type = other DNA
agatttgtaagaacggaaca

SEQ ID NO: 54355 - DNA, 20 bp, synthetic construct
  misc_feature 1..20: note = chemically synthesized
  source 1..20: mol_type = other DNA
tttgtaagaacggaacatag

SEQ ID NO: 54356 - DNA, 20 bp, synthetic construct
  misc_feature 1..20: note = chemically synthesized
  source 1..20: mol_type = other DNA
acggaacatagcagcattca

SEQ ID NO: 54357 - DNA, 20 bp, synthetic construct
  misc_feature 1..20: note = chemically synthesized
  source 1..20: mol_type = other DNA
gaacatagcagcattcaaag

SEQ ID NO: 54358 - DNA, 20 bp, synthetic construct
  misc_feature 1..20: note = chemically synthesized
  source 1..20: mol_type = other DNA
agcattcaaagaagaatgtt

SEQ ID NO: 54359 - DNA, 20 bp, synthetic construct
  misc_feature 1..20: note = chemically synthesized
  source 1..20: mol_type = other DNA
caaagaagaatgttgagaac

SEQ ID NO: 54360 - DNA, 20 bp, synthetic construct
  misc_feature 1..20: note = chemically synthesized
  source 1..20: mol_type = other DNA
aaagaagaatgttgagaaca

SEQ ID NO: 54361 - DNA, 20 bp, synthetic construct
  misc_feature 1..20: note = chemically synthesized
  source 1..20: mol_type = other DNA
aagaagaatgttgagaacaa

SEQ ID NO: 54362 - DNA, 20 bp, synthetic construct
  misc_feature 1..20: note = chemically synthesized
  source 1..20: mol_type = other DNA
gaagaatgttgagaacaagg

SEQ ID NO: 54363 - DNA, 20 bp, synthetic construct
  misc_feature 1..20: note = chemically synthesized
  source 1..20: mol_type = other DNA
gttgagaacaagggagataa

SEQ ID NO: 54364 - DNA, 20 bp, synthetic construct
  misc_feature 1..20: note = chemically synthesized
  source 1..20: mol_type = other DNA
caagggagataatggtttca

SEQ ID NO: 54365 - DNA, 20 bp, synthetic construct
  misc_feature 1..20: note = chemically synthesized
  source 1..20: mol_type = other DNA
tggtttcatggtaatcacaa

SEQ ID NO: 54366 - DNA, 20 bp, synthetic construct
  misc_feature 1..20: note = chemically synthesized
  source 1..20: mol_type = other DNA
tggtaatcacaaaagtaaca

SEQ ID NO: 54367 - DNA, 20 bp, synthetic construct
  misc_feature 1..20: note = chemically synthesized
  source 1..20: mol_type = other DNA
cacaaaagtaacacagcatt

SEQ ID NO: 54368 - DNA, 20 bp, synthetic construct
  misc_feature 1..20: note = chemically synthesized
  source 1..20: mol_type = other DNA
agtaacacagcatttagtac

SEQ ID NO: 54369 - DNA, 20 bp, synthetic construct
  misc_feature 1..20: note = chemically synthesized
  source 1..20: mol_type = other DNA
gtaacacagcatttagtact

SEQ ID NO: 54370 - DNA, 20 bp, synthetic construct
  misc_feature 1..20: note = chemically synthesized
  source 1..20: mol_type = other DNA
tagtactgggttccatgttt

SEQ ID NO: 54371 - DNA, 20 bp, synthetic construct
  misc_feature 1..20: note = chemically synthesized
  source 1..20: mol_type = other DNA
agtactgggttccatgtttg

SEQ ID NO: 54372 - DNA, 20 bp, synthetic construct
  misc_feature 1..20: note = chemically synthesized
  source 1..20: mol_type = other DNA
actgggttccatgtttgagg

SEQ ID NO: 54373 - DNA, 20 bp, synthetic construct
  misc_feature 1..20: note = chemically synthesized
  source 1..20: mol_type = other DNA
tccatgtttgaggaagaacc

SEQ ID NO: 54374 - DNA, 20 bp, synthetic construct
  misc_feature 1..20: note = chemically synthesized
  source 1..20: mol_type = other DNA
atgtttgaggaagaacctgg

SEQ ID NO: 54375 - DNA, 20 bp, synthetic construct
  misc_feature 1..20: note = chemically synthesized
  source 1..20: mol_type = other DNA
gccatatcacatgaaaaacc

SEQ ID NO: 54376 - DNA, 20 bp, synthetic construct
  misc_feature 1..20: note = chemically synthesized
  source 1..20: mol_type = other DNA
ccatatcacatgaaaaacct

SEQ ID NO: 54377 - DNA, 20 bp, synthetic construct
  misc_feature 1..20: note = chemically synthesized
  source 1..20: mol_type = other DNA
atgaaaaacctgggaatgtt

SEQ ID NO: 54378 - DNA, 20 bp, synthetic construct
  misc_feature 1..20: note = chemically synthesized
  source 1..20: mol_type = other DNA
tgaaaaacctgggaatgttt

SEQ ID NO: 54379 - DNA, 20 bp, synthetic construct
  misc_feature 1..20: note = chemically synthesized
  source 1..20: mol_type = other DNA
aaacctgggaatgtttaggt

SEQ ID NO: 54380 - DNA, 20 bp, synthetic construct
  misc_feature 1..20: note = chemically synthesized
  source 1..20: mol_type = other DNA
acctgggaatgtttaggtta

SEQ ID NO: 54381 - DNA, 20 bp, synthetic construct
  misc_feature 1..20: note = chemically synthesized
  source 1..20: mol_type = other DNA
ctgggaatgtttaggttaga

SEQ ID NO: 54382 - DNA, 20 bp, synthetic construct
  misc_feature 1..20: note = chemically synthesized
  source 1..20: mol_type = other DNA
aactgtgttcaaatgtgtga

SEQ ID NO: 54383 - DNA, 20 bp, synthetic construct
  misc_feature 1..20: note = chemically synthesized
  source 1..20: mol_type = other DNA
ctgtgttcaaatgtgtgaca

SEQ ID NO: 54384 - DNA, 20 bp, synthetic construct
  misc_feature 1..20: note = chemically synthesized
  source 1..20: mol_type = other DNA
tgtgttcaaatgtgtgacag

SEQ ID NO: 54385 - DNA, 20 bp, synthetic construct
  misc_feature 1..20: note = chemically synthesized
  source 1..20: mol_type = other DNA
gtgttcaaatgtgtgacaga

SEQ ID NO: 54386 - DNA, 20 bp, synthetic construct
  misc_feature 1..20: note = chemically synthesized
  source 1..20: mol_type = other DNA
caaatgtgtgacagagggac

SEQ ID NO: 54387 - DNA, 20 bp, synthetic construct
  misc_feature 1..20: note = chemically synthesized
  source 1..20: mol_type = other DNA
tcatcacttactaactcctg

SEQ ID NO: 54388 - DNA, 20 bp, synthetic construct
  misc_feature 1..20: note = chemically synthesized
  source 1..20: mol_type = other DNA
cacttactaactcctgcaga

SEQ ID NO: 54389 - DNA, 20 bp, synthetic construct
  misc_feature 1..20: note = chemically synthesized
  source 1..20: mol_type = other DNA
taactcctgcagaaagaact

SEQ ID NO: 54390 - DNA, 20 bp, synthetic construct
  misc_feature 1..20: note = chemically synthesized
  source 1..20: mol_type = other DNA
gcagaaagaactgagaaaaa

SEQ ID NO: 54391 - DNA, 20 bp, synthetic construct
  misc_feature 1..20: note = chemically synthesized
  source 1..20: mol_type = other DNA
aaagaactgagaaaaataga

SEQ ID NO: 54392 - DNA, 20 bp, synthetic construct
  misc_feature 1..20: note = chemically synthesized
  source 1..20: mol_type = other DNA
ctgagaaaaatagacagtat

SEQ ID NO: 54393 - DNA, 20 bp, synthetic construct
  misc_feature 1..20: note = chemically synthesized
  source 1..20: mol_type = other DNA
gagaaaaatagacagtatta

SEQ ID NO: 54394 - DNA, 20 bp, synthetic construct
  misc_feature 1..20: note = chemically synthesized
  source 1..20: mol_type = other DNA
agaaaaatagacagtattag

SEQ ID NO: 54395 - DNA, 20 bp, synthetic construct
  misc_feature 1..20: note = chemically synthesized
  source 1..20: mol_type = other DNA
gaaaaatagacagtattaga

SEQ ID NO: 54396 - DNA, 20 bp, synthetic construct
  misc_feature 1..20: note = chemically synthesized
  source 1..20: mol_type = other DNA
aaaaatagacagtattagag

SEQ ID NO: 54397 - DNA, 20 bp, synthetic construct
  misc_feature 1..20: note = chemically synthesized
  source 1..20: mol_type = other DNA
aaaatagacagtattagagg

SEQ ID NO: 54398 - DNA, 20 bp, synthetic construct
  misc_feature 1..20: note = chemically synthesized
  source 1..20: mol_type = other DNA
agacagtattagagggggac

SEQ ID NO: 54399 - DNA, 20 bp, synthetic construct
  misc_feature 1..20: note = chemically synthesized
  source 1..20: mol_type = other DNA
agagggggaccagtttcaca

SEQ ID NO: 54400 - DNA, 20 bp, synthetic construct
  misc_feature 1..20: note = chemically synthesized
  source 1..20: mol_type = other DNA
gggaccagtttcacacagac

SEQ ID NO: 54401 - DNA, 20 bp, synthetic construct
  misc_feature 1..20: note = chemically synthesized
  source 1..20: mol_type = other DNA
ggaccagtttcacacagaca

SEQ ID NO: 54402 - DNA, 20 bp, synthetic construct
  misc_feature 1..20: note = chemically synthesized
  source 1..20: mol_type = other DNA
ccagtttcacacagacaagg

SEQ ID NO: 54403 - DNA, 20 bp, synthetic construct
  misc_feature 1..20: note = chemically synthesized
  source 1..20: mol_type = other DNA
acagacaaggaagaactatt

SEQ ID NO: 54404 - DNA, 20 bp, synthetic construct
  misc_feature 1..20: note = chemically synthesized
  source 1..20: mol_type = other DNA
tcagcaatcaattccgttca

SEQ ID NO: 54405 - DNA, 20 bp, synthetic construct
  misc_feature 1..20: note = chemically synthesized
  source 1..20: mol_type = other DNA
aattccgttcaaagataaaa

SEQ ID NO: 54406 - DNA, 20 bp, synthetic construct
  misc_feature 1..20: note = chemically synthesized
  source 1..20: mol_type = other DNA
aaagataaaatggactgtta

SEQ ID NO: 54407 - DNA, 20 bp, synthetic construct
  misc_feature 1..20: note = chemically synthesized
  source 1..20: mol_type = other DNA
gataaaatggactgttatag

SEQ ID NO: 54408 - DNA, 20 bp, synthetic construct
  misc_feature 1..20: note = chemically synthesized
  source 1..20: mol_type = other DNA
ataaaatggactgttatagt

SEQ ID NO: 54409 - DNA, 20 bp, synthetic construct
  misc_feature 1..20: note = chemically synthesized
  source 1..20: mol_type = other DNA
taaaatggactgttatagtg

SEQ ID NO: 54410 - DNA, 20 bp, synthetic construct
  misc_feature 1..20: note = chemically synthesized
  source 1..20: mol_type = other DNA
aaaatggactgttatagtgg

SEQ ID NO: 54411 - DNA, 20 bp, synthetic construct
  misc_feature 1..20: note = chemically synthesized
  source 1..20: mol_type = other DNA
tggactgttatagtgggggt

SEQ ID NO: 54412 - DNA, 20 bp, synthetic construct
  misc_feature 1..20: note = chemically synthesized
  source 1..20: mol_type = other DNA
ggggtgagctccctacctct

SEQ ID NO: 54413 - DNA, 20 bp, synthetic construct
  misc_feature 1..20: note = chemically synthesized
  source 1..20: mol_type = other DNA
gggtgagctccctacctctg

SEQ ID NO: 54414 - DNA, 20 bp, synthetic construct
  misc_feature 1..20: note = chemically synthesized
  source 1..20: mol_type = other DNA
ggtgagctccctacctctga

SEQ ID NO: 54415 - DNA, 20 bp, synthetic construct
  misc_feature 1..20: note = chemically synthesized
  source 1..20: mol_type = other DNA
cctacctctgagggtatttc

SEQ ID NO: 54416 - DNA, 20 bp, synthetic construct
  misc_feature 1..20: note = chemically synthesized
  source 1..20: mol_type = other DNA
acctctgagggtatttcaag

SEQ ID NO: 54417 - DNA, 20 bp, synthetic construct
  misc_feature 1..20: note = chemically synthesized
  source 1..20: mol_type = other DNA
ctctgagggtatttcaagta

SEQ ID NO: 54418 - DNA, 20 bp, synthetic construct
  misc_feature 1..20: note = chemically synthesized
  source 1..20: mol_type = other DNA
gagggtatttcaagtagaga

SEQ ID NO: 54419 - DNA, 20 bp, synthetic construct
  misc_feature 1..20: note = chemically synthesized
  source 1..20: mol_type = other DNA
agggtatttcaagtagagat

SEQ ID NO: 54420 - DNA, 20 bp, synthetic construct
  misc_feature 1..20: note = chemically synthesized
  source 1..20: mol_type = other DNA
ggtatttcaagtagagatag

SEQ ID NO: 54421 - DNA, 20 bp, synthetic construct
  misc_feature 1..20: note = chemically synthesized
  source 1..20: mol_type = other DNA
gtatttcaagtagagatagg

SEQ ID NO: 54422 - DNA, 20 bp, synthetic construct
  misc_feature 1..20: note = chemically synthesized
  source 1..20: mol_type = other DNA
gtagagataggaggacctcc

SEQ ID NO: 54423 - DNA, 20 bp, synthetic construct
  misc_feature 1..20: note = chemically synthesized
  source 1..20: mol_type = other DNA
gagataggaggacctcctgg

SEQ ID NO: 54424 - DNA, 20 bp, synthetic construct
  misc_feature 1..20: note = chemically synthesized
  source 1..20: mol_type = other DNA
agataggaggacctcctggt

SEQ ID NO: 54425 - DNA, 20 bp, synthetic construct
  misc_feature 1..20: note = chemically synthesized
  source 1..20: mol_type = other DNA
cctggtaggaaatttgcata

SEQ ID NO: 54426 - DNA, 20 bp, synthetic construct
  misc_feature 1..20: note = chemically synthesized
  source 1..20: mol_type = other DNA
ggtaggaaatttgcatacgg

SEQ ID NO: 54427 - DNA, 20 bp, synthetic construct
  misc_feature 1..20: note = chemically synthesized
  source 1..20: mol_type = other DNA
gtaggaaatttgcatacggt

SEQ ID NO: 54428 - DNA, 20 bp, synthetic construct
  misc_feature 1..20: note = chemically synthesized
  source 1..20: mol_type = other DNA
aggaaatttgcatacggtgg

SEQ ID NO: 54429 - DNA, 20 bp, synthetic construct
  misc_feature 1..20: note = chemically synthesized
  source 1..20: mol_type = other DNA
gtgggagattgtacgtgata

SEQ ID NO: 54430 - DNA, 20 bp, synthetic construct
  misc_feature 1..20: note = chemically synthesized
  source 1..20: mol_type = other DNA
gatatggcacctccatctga

SEQ ID NO: 54431 - DNA, 20 bp, synthetic construct
  misc_feature 1..20: note = chemically synthesized
  source 1..20: mol_type = other DNA
tatggcacctccatctgaaa

SEQ ID NO: 54432 - DNA, 20 bp, synthetic construct
  misc_feature 1..20: note = chemically synthesized
  source 1..20: mol_type = other DNA
catctgaaagagtctatatt

SEQ ID NO: 54433 - DNA, 20 bp, synthetic construct
  misc_feature 1..20: note = chemically synthesized
  source 1..20: mol_type = other DNA
atctgaaagagtctatattg

SEQ ID NO: 54434 - DNA, 20 bp, synthetic construct
  misc_feature 1..20: note = chemically synthesized
  source 1..20: mol_type = other DNA
tctgaaagagtctatattga

SEQ ID NO: 54435 - DNA, 20 bp, synthetic construct
  misc_feature 1..20: note = chemically synthesized
  source 1..20: mol_type = other DNA
gaaagagtctatattgaggg

SEQ ID NO: 54436 - DNA, 20 bp, synthetic construct
  misc_feature 1..20: note = chemically synthesized
  source 1..20: mol_type = other DNA
aaagagtctatattgagggc

SEQ ID NO: 54437 - DNA, 20 bp, synthetic construct
  misc_feature 1..20: note = chemically synthesized
  source 1..20: mol_type = other DNA
agtctatattgagggcaggc

SEQ ID NO: 54438 - DNA, 20 bp, synthetic construct
  misc_feature 1..20: note = chemically synthesized
  source 1..20: mol_type = other DNA
tctatattgagggcaggctg

SEQ ID NO: 54439 - DNA, 20 bp, synthetic construct
  misc_feature 1..20: note = chemically synthesized
  source 1..20: mol_type = other DNA
gggcaggctggagtcacaca

SEQ ID NO: 54440 - DNA, 20 bp, synthetic construct
  misc_feature 1..20: note = chemically synthesized
  source 1..20: mol_type = other DNA
ggcaggctggagtcacacat

SEQ ID NO: 54441 - DNA, 20 bp, synthetic construct
  misc_feature 1..20: note = chemically synthesized
  source 1..20: mol_type = other DNA
ctggagtcacacatgggaat

SEQ ID NO: 54442 - DNA, 20 bp, synthetic construct
  misc_feature 1..20: note = chemically synthesized
  source 1..20: mol_type = other DNA
agtcacacatgggaataagc

SEQ ID NO: 54443 - DNA, 20 bp, synthetic construct
  misc_feature 1..20: note = chemically synthesized
  source 1..20: mol_type = other DNA
gtcacacatgggaataagcc

SEQ ID NO: 54444 - DNA, 20 bp, synthetic construct
  misc_feature 1..20: note = chemically synthesized
  source 1..20: mol_type = other DNA
ccatctgtgatttaattcca

SEQ ID NO: 54445 - DNA, 20 bp, synthetic construct
  misc_feature 1..20: note = chemically synthesized
  source 1..20: mol_type = other DNA
gtgatttaattccacagtcg

SEQ ID NO: 54446 - DNA, 20 bp, synthetic construct
  misc_feature 1..20: note = chemically synthesized
  source 1..20: mol_type = other DNA
ttaattccacagtcgcagaa

SEQ ID NO: 54447 - DNA, 20 bp, synthetic construct
  misc_feature 1..20: note = chemically synthesized
  source 1..20: mol_type = other DNA
ttccacagtcgcagaacgga

SEQ ID NO: 54448 - DNA, 20 bp, synthetic construct
  misc_feature 1..20: note = chemically synthesized
  source 1..20: mol_type = other DNA
cactcctccaaacccacctc

SEQ ID NO: 54449 - DNA, 20 bp, synthetic construct
  misc_feature 1..20: note = chemically synthesized
  source 1..20: mol_type = other DNA
ctccaaacccacctctagca

SEQ ID NO: 54450 - DNA, 20 bp, synthetic construct
  misc_feature 1..20: note = chemically synthesized
  source 1..20: mol_type = other DNA
tccaaacccacctctagcaa

SEQ ID NO: 54451 - DNA, 20 bp, synthetic construct
  misc_feature 1..20: note = chemically synthesized
  source 1..20: mol_type = other DNA
caaatccttcctatctctca

SEQ ID NO: 54452 - DNA, 20 bp, synthetic construct
  misc_feature 1..20: note = chemically synthesized
  source 1..20: mol_type = other DNA
cagtcatgctttcttccact

SEQ ID NO: 54453 - DNA, 20 bp, synthetic construct
  misc_feature 1..20: note = chemically synthesized
  source 1..20: mol_type = other DNA
agtcatgctttcttccactc

SEQ ID NO: 54454 - DNA, 20 bp, synthetic construct
  misc_feature 1..20: note = chemically synthesized
  source 1..20: mol_type = other DNA
ccactcaggcattgctgttg

SEQ ID NO: 54455 - DNA, 20 bp, synthetic construct
  misc_feature 1..20: note = chemically synthesized
  source 1..20: mol_type = other DNA
attgctgttgcagaaacttt

SEQ ID NO: 54456 - DNA, 20 bp, synthetic construct
  misc_feature 1..20: note = chemically synthesized
  source 1..20: mol_type = other DNA
gaaactttcagccacatcca

SEQ ID NO: 54457 - DNA, 20 bp, synthetic construct
  misc_feature 1..20: note = chemically synthesized
  source 1..20: mol_type = other DNA
atccacagcatctataatgc

SEQ ID NO: 54458 - DNA, 20 bp, synthetic construct
  misc_feature 1..20: note = chemically synthesized
  source 1..20: mol_type = other DNA
gcatctataatgccagcctc

SEQ ID NO: 54459 - DNA, 20 bp, synthetic construct
  misc_feature 1..20: note = chemically synthesized
  source 1..20: mol_type = other DNA
ctcattaccttcttcctgtt

SEQ ID NO: 54460 - DNA, 20 bp, synthetic construct
  misc_feature 1..20: note = chemically synthesized
  source 1..20: mol_type = other DNA
ttcctgttcagcttcgccat

SEQ ID NO: 54461 - DNA, 20 bp, synthetic construct
  misc_feature 1..20: note = chemically synthesized
  source 1..20: mol_type = other DNA
tcggattttatctgctgctc

SEQ ID NO: 54462 - DNA, 20 bp, synthetic construct
  misc_feature 1..20: note = chemically synthesized
  source 1..20: mol_type = other DNA
cggattttatctgctgctca

SEQ ID NO: 54463 - DNA, 20 bp, synthetic construct
  misc_feature 1..20: note = chemically synthesized
  source 1..20: mol_type = other DNA
ggattttatctgctgctcaa

SEQ ID NO: 54464 - DNA, 20 bp, synthetic construct
  misc_feature 1..20: note = chemically synthesized
  source 1..20: mol_type = other DNA
ttatctgctgctcaagggac

SEQ ID NO: 54465 - DNA, 20 bp, synthetic construct
  misc_feature 1..20: note = chemically synthesized
  source 1..20: mol_type = other DNA
tatctgctgctcaagggact

SEQ ID NO: 54466 - DNA, 20 bp, synthetic construct
  misc_feature 1..20: note = chemically synthesized
  source 1..20: mol_type = other DNA
gctgctcaagggactgggtg

SEQ ID NO: 54467 - DNA, 20 bp, synthetic construct
  misc_feature 1..20: note = chemically synthesized
  source 1..20: mol_type = other DNA
gactgggtgtagacctcctg

SEQ ID NO: 54468 - DNA, 20 bp, synthetic construct
  misc_feature 1..20: note = chemically synthesized
  source 1..20: mol_type = other DNA
tgtagacctcctgtggactc

SEQ ID NO: 54469 - DNA, 20 bp, synthetic construct
  misc_feature 1..20: note = chemically synthesized
  source 1..20: mol_type = other DNA
tagacctcctgtggactctg

SEQ ID NO: 54470 - DNA, 20 bp, synthetic construct
  misc_feature 1..20: note = chemically synthesized
  source 1..20: mol_type = other DNA
cctcctgtggactctggaga

SEQ ID NO: 54471 - DNA, 20 bp, synthetic construct
  misc_feature 1..20: note = chemically synthesized
  source 1..20: mol_type = other DNA
tgtggactctggagaaagcc

SEQ ID NO: 54472 - DNA, 20 bp, synthetic construct
  misc_feature 1..20: note = chemically synthesized
  source 1..20: mol_type = other DNA
tggactctggagaaagccca

SEQ ID NO: 54473 - DNA, 20 bp, synthetic construct
  misc_feature 1..20: note = chemically synthesized
  source 1..20: mol_type = other DNA
ggactctggagaaagcccag

SEQ ID NO: 54474 - DNA, 20 bp, synthetic construct
  misc_feature 1..20: note = chemically synthesized
  source 1..20: mol_type = other DNA
ctctggagaaagcccagagg

SEQ ID NO: 54475 - DNA, 20 bp, synthetic construct
  misc_feature 1..20: note = chemically synthesized
  source 1..20: mol_type = other DNA
agaaagcccagaggtggtgc

SEQ ID NO: 54476 - DNA, 20 bp, synthetic construct
  misc_feature 1..20: note = chemically synthesized
  source 1..20: mol_type = other DNA
aagcccagaggtggtgcgag

SEQ ID NO: 54477 - DNA, 20 bp, synthetic construct
  misc_feature 1..20: note = chemically synthesized
  source 1..20: mol_type = other DNA
ccagaggtggtgcgagcagc

SEQ ID NO: 54478 - DNA, 20 bp, synthetic construct
  misc_feature 1..20: note = chemically synthesized
  source 1..20: mol_type = other DNA
ggtggtgcgagcagccagaa

SEQ ID NO: 54479 - DNA, 20 bp, synthetic construct
  misc_feature 1..20: note = chemically synthesized
  source 1..20: mol_type = other DNA
gtggtgcgagcagccagaat

SEQ ID NO: 54480 - DNA, 20 bp, synthetic construct
  misc_feature 1..20: note = chemically synthesized
  source 1..20: mol_type = other DNA
attgacaccacaccctttgc

SEQ ID NO: 54481 - DNA, 20 bp, synthetic construct
  misc_feature 1..20: note = chemically synthesized
  source 1..20: mol_type = other DNA
caccctttgccagcctcctc

SEQ ID NO: 54482 - DNA, 20 bp, synthetic construct
  misc_feature 1..20: note = chemically synthesized
  source 1..20: mol_type = other DNA
tgccagcctcctcaagaacc

SEQ ID NO: 54483 - DNA, 20 bp, synthetic construct
  misc_feature 1..20: note = chemically synthesized
  source 1..20: mol_type = other DNA
gccagcctcctcaagaacct

SEQ ID NO: 54484 - DNA, 20 bp, synthetic construct
  misc_feature 1..20: note = chemically synthesized
  source 1..20: mol_type = other DNA
aagaacctgggcacgctctt

SEQ ID NO: 54485 - DNA, 20 bp, synthetic construct
  misc_feature 1..20: note = chemically synthesized
  source 1..20: mol_type = other DNA
cctgggcacgctctttggcc

SEQ ID NO: 54486 - DNA, 20 bp, synthetic construct
  misc_feature 1..20: note = chemically synthesized
  source 1..20: mol_type = other DNA
ctgggcacgctctttggcct

SEQ ID NO: 54487 - DNA, 20 bp, synthetic construct
  misc_feature 1..20: note = chemically synthesized
  source 1..20: mol_type = other DNA
tgggcacgctctttggcctg

SEQ ID NO: 54488 - DNA, 20 bp, synthetic construct
  misc_feature 1..20: note = chemically synthesized
  source 1..20: mol_type = other DNA
cacgctctttggcctggggc

SEQ ID NO: 54489 - DNA, 20 bp, synthetic construct
  misc_feature 1..20: note = chemically synthesized
  source 1..20: mol_type = other DNA
ctggggctggctctcaactc

SEQ ID NO: 54490 - DNA, 20 bp, synthetic construct
  misc_feature 1..20: note = chemically synthesized
  source 1..20: mol_type = other DNA
gctctcaactccagcatgta

SEQ ID NO: 54491 - DNA, 20 bp, synthetic construct
  misc_feature 1..20: note = chemically synthesized
  source 1..20: mol_type = other DNA
ctctcaactccagcatgtac

SEQ ID NO: 54492 - DNA, 20 bp, synthetic construct
  misc_feature 1..20: note = chemically synthesized
  source 1..20: mol_type = other DNA
tctcaactccagcatgtaca

SEQ ID NO: 54493 - DNA, 20 bp, synthetic construct
  misc_feature 1..20: note = chemically synthesized
  source 1..20: mol_type = other DNA
tcaactccagcatgtacagg

SEQ ID NO: 54494 - DNA, 20 bp, synthetic construct
  misc_feature 1..20: note = chemically synthesized
  source 1..20: mol_type = other DNA
aactccagcatgtacaggga

SEQ ID NO: 54495 - DNA, 20 bp, synthetic construct
  misc_feature 1..20: note = chemically synthesized
  source 1..20: mol_type = other DNA
gcatgtacagggagagctgc

SEQ ID NO: 54496 - DNA, 20 bp, synthetic construct
  misc_feature 1..20: note = chemically synthesized
  source 1..20: mol_type = other DNA
catgtacagggagagctgca

SEQ ID NO: 54497 - DNA, 20 bp, synthetic construct
  misc_feature 1..20: note = chemically synthesized
  source 1..20: mol_type = other DNA
atgtacagggagagctgcaa

SEQ ID NO: 54498 - DNA, 20 bp, synthetic construct
  misc_feature 1..20: note = chemically synthesized
  source 1..20: mol_type = other DNA
tgtacagggagagctgcaag

SEQ ID NO: 54499 - DNA, 20 bp, synthetic construct
  misc_feature 1..20: note = chemically synthesized
  source 1..20: mol_type = other DNA
gagagctgcaaggggaaact

SEQ ID NO: 54500 - DNA, 20 bp, synthetic construct
  misc_feature 1..20: note = chemically synthesized
  source 1..20: mol_type = other DNA
gctgcaaggggaaactcagc

SEQ ID NO: 54501 - DNA, 20 bp, synthetic construct
  misc_feature 1..20: note = chemically synthesized
  source 1..20: mol_type = other DNA
gcaaggggaaactcagcaag

SEQ ID NO: 54502 - DNA, 20 bp, synthetic construct
  misc_feature 1..20: note = chemically synthesized
  source 1..20: mol_type = other DNA
aagtggctcccattccgcct

SEQ ID NO: 54503 - DNA, 20 bp, synthetic construct
  misc_feature 1..20: note = chemically synthesized
  source 1..20: mol_type = other DNA
attccgcctcagctctattg

SEQ ID NO: 54504 - DNA, 20 bp, synthetic construct
  misc_feature 1..20: note = chemically synthesized
  source 1..20: mol_type = other DNA
ctccttgaaacccccatccc

SEQ ID NO: 54505 - DNA, 20 bp, synthetic construct
  misc_feature 1..20: note = chemically synthesized
  source 1..20: mol_type = other DNA
tgaaacccccatcccaagtc

SEQ ID NO: 54506 - DNA, 20 bp, synthetic construct
  misc_feature 1..20: note = chemically synthesized
  source 1..20: mol_type = other DNA
acccccatcccaagtcgagc

SEQ ID NO: 54507 - DNA, 20 bp, synthetic construct
  misc_feature 1..20: note = chemically synthesized
  source 1..20: mol_type = other DNA
tctacgtcttgtccttctgc

SEQ ID NO: 54508 - DNA, 20 bp, synthetic construct
  misc_feature 1..20: note = chemically synthesized
  source 1..20: mol_type = other DNA
tacgtcttgtccttctgcaa

SEQ ID NO: 54509 - DNA, 20 bp, synthetic construct
  misc_feature 1..20: note = chemically synthesized
  source 1..20: mol_type = other DNA
cttgtccttctgcaagagtg

SEQ ID NO: 54510 - DNA, 20 bp, synthetic construct
  misc_feature 1..20: note = chemically synthesized
  source 1..20: mol_type = other DNA
gtccttctgcaagagtgcgg

SEQ ID NO: 54511 - DNA, 20 bp, synthetic construct
  misc_feature 1..20: note = chemically synthesized
  source 1..20: mol_type = other DNA
caagagtgcggtagtgcccc

SEQ ID NO: 54512 - DNA, 20 bp, synthetic construct
  misc_feature 1..20: note = chemically synthesized
  source 1..20: mol_type = other DNA
gtagtgcccctggcatccgt

SEQ ID NO: 54513 - DNA, 20 bp, synthetic construct
  misc_feature 1..20: note = chemically synthesized
  source 1..20: mol_type = other DNA
tcatcccctactgcctcgcc

SEQ ID NO: 54514 - DNA, 20 bp, synthetic construct
  misc_feature 1..20: note = chemically synthesized
  source 1..20: mol_type = other DNA
catcccctactgcctcgccc

SEQ ID NO: 54515 - DNA, 20 bp, synthetic construct
  misc_feature 1..20: note = chemically synthesized
  source 1..20: mol_type = other DNA
ctactgcctcgcccaggtcc

SEQ ID NO: 54516 - DNA, 20 bp, synthetic construct
  misc_feature 1..20: note = chemically synthesized
  source 1..20: mol_type = other DNA
tactgcctcgcccaggtcct

SEQ ID NO: 54517 - DNA, 20 bp, synthetic construct
  misc_feature 1..20: note = chemically synthesized
  source 1..20: mol_type = other DNA
gcctcgcccaggtcctgggc

SEQ ID NO: 54518 - DNA, 20 bp, synthetic construct
  misc_feature 1..20: note = chemically synthesized
  source 1..20: mol_type = other DNA
aggtcctgggccagccgcac

SEQ ID NO: 54519 - DNA, 20 bp, synthetic construct
  misc_feature 1..20: note = chemically synthesized
  source 1..20: mol_type = other DNA
tcctgggccagccgcacaag

SEQ ID NO: 54520 - DNA, 20 bp, synthetic construct
  misc_feature 1..20: note = chemically synthesized
  source 1..20: mol_type = other DNA
gccgcacaagaagtcgttgt

SEQ ID NO: 54521 - DNA, 20 bp, synthetic construct
  misc_feature 1..20: note = chemically synthesized
  source 1..20: mol_type = other DNA
cgcacaagaagtcgttgtaa

SEQ ID NO: 54522 - DNA, 20 bp, synthetic construct
  misc_feature 1..20: note = chemically synthesized
  source 1..20: mol_type = other DNA
agaagtcgttgtaagagatg

SEQ ID NO: 54523 - DNA, 20 bp, synthetic construct
  misc_feature 1..20: note = chemically synthesized
  source 1..20: mol_type = other DNA
aagtcgttgtaagagatgtg

SEQ ID NO: 54524 - DNA, 20 bp, synthetic construct
  misc_feature 1..20: note = chemically synthesized
  source 1..20: mol_type = other DNA
tgtaagagatgtggagtctt

SEQ ID NO: 54525 - DNA, 20 bp, synthetic construct
  misc_feature 1..20: note = chemically synthesized
  source 1..20: mol_type = other DNA
tgtggagtcttcggtgttta

SEQ ID NO: 54526 - DNA, 20 bp, synthetic construct
  misc_feature 1..20: note = chemically synthesized
  source 1..20: mol_type = other DNA
tttaaagtcaacaaccatgc

SEQ ID NO: 54527 - DNA, 20 bp, synthetic construct
  misc_feature 1..20: note = chemically synthesized
  source 1..20: mol_type = other DNA
ttaaagtcaacaaccatgcc

SEQ ID NO: 54528 - DNA, 20 bp, synthetic construct
  misc_feature 1..20: note = chemically synthesized
  source 1..20: mol_type = other DNA
taaagtcaacaaccatgcca

SEQ ID NO: 54529 - DNA, 20 bp, synthetic construct
  misc_feature 1..20: note = chemically synthesized
  source 1..20: mol_type = other DNA
caacaaccatgccagggatt

SEQ ID NO: 54530 - DNA, 20 bp, synthetic construct
  misc_feature 1..20: note = chemically synthesized
  source 1..20: mol_type = other DNA
aacaaccatgccagggattg

SEQ ID NO: 54531 - DNA, 20 bp, synthetic construct
  misc_feature 1..20: note = chemically synthesized
  source 1..20: mol_type = other DNA
caaccatgccagggattgag

SEQ ID NO: 54532 - DNA, 20 bp, synthetic construct
  misc_feature 1..20: note = chemically synthesized
  source 1..20: mol_type = other DNA
aaccatgccagggattgagg

SEQ ID NO: 54533 - DNA, 20 bp, synthetic construct
  misc_feature 1..20: note = chemically synthesized
  source 1..20: mol_type = other DNA
ttgaggaggactactatttg

SEQ ID NO: 54534 - DNA, 20 bp, synthetic construct
  misc_feature 1..20: note = chemically synthesized
  source 1..20: mol_type = other DNA
aggactactatttgaagcaa

SEQ ID NO: 54535 - DNA, 20 bp, synthetic construct
  misc_feature 1..20: note = chemically synthesized
  source 1..20: mol_type = other DNA
ggactactatttgaagcaat

SEQ ID NO: 54536 - DNA, 20 bp, synthetic construct
  misc_feature 1..20: note = chemically synthesized
  source 1..20: mol_type = other DNA
ctatttgaagcaatgggcac

SEQ ID NO: 54537 - DNA, 20 bp, synthetic construct
  misc_feature 1..20: note = chemically synthesized
  source 1..20: mol_type = other DNA
aagcaatgggcactggtatt

SEQ ID NO: 54538 - DNA, 20 bp, synthetic construct
  misc_feature 1..20: note = chemically synthesized
  source 1..20: mol_type = other DNA
gcaatgggcactggtatttg

SEQ ID NO: 54539 - DNA, 20 bp, synthetic construct
  misc_feature 1..20: note = chemically synthesized
  source 1..20: mol_type = other DNA
tgggcactggtatttggagc

SEQ ID NO: 54540 - DNA, 20 bp, synthetic construct
  misc_feature 1..20: note = chemically synthesized
  source 1..20: mol_type = other DNA
tgccatccattctgccgtcg

SEQ ID NO: 54541 - DNA, 20 bp, synthetic construct
  misc_feature 1..20: note = chemically synthesized
  source 1..20: mol_type = other DNA
gccgtcgtggaattaaatca

SEQ ID NO: 54542 - DNA, 20 bp, synthetic construct
  misc_feature 1..20: note = chemically synthesized
  source 1..20: mol_type = other DNA
tcgtggaattaaatcacgga

SEQ ID NO: 54543 - DNA, 20 bp, synthetic construct
  misc_feature 1..20: note = chemically synthesized
  source 1..20: mol_type = other DNA
tggaattaaatcacggatgg

SEQ ID NO: 54544 - DNA, 20 bp, synthetic construct
  misc_feature 1..20: note = chemically synthesized
  source 1..20: mol_type = other DNA
ttaaatcacggatggcagat

SEQ ID NO: 54545 - DNA, 20 bp, synthetic construct
  misc_feature 1..20: note = chemically synthesized
  source 1..20: mol_type = other DNA
aaatcacggatggcagattg

SEQ ID NO: 54546 - DNA, 20 bp, synthetic construct
  misc_feature 1..20: note = chemically synthesized
  source 1..20: mol_type = other DNA
aatcacggatggcagattgg

SEQ ID NO: 54547 - DNA, 20 bp, synthetic construct
  misc_feature 1..20: note = chemically synthesized
  source 1..20: mol_type = other DNA
atcacggatggcagattgga

SEQ ID NO: 54548 - DNA, 20 bp, synthetic construct
  misc_feature 1..20: note = chemically synthesized
  source 1..20: mol_type = other DNA
tggcagattggagggtcgcc

SEQ ID NO: 54549 - DNA, 20 bp, synthetic construct
  misc_feature 1..20: note = chemically synthesized
  source 1..20: mol_type = other DNA
cttattcccatgtgtgactc

SEQ ID NO: 54550 - DNA, 20 bp, synthetic construct
  misc_feature 1..20: note = chemically synthesized
  source 1..20: mol_type = other DNA
gtgtgactccagcctgccct

SEQ ID NO: 54551 - DNA, 20 bp, synthetic construct
  misc_feature 1..20: note = chemically synthesized
  source 1..20: mol_type = other DNA
actccagcctgccctcagca

SEQ ID NO: 54552 - DNA, 20 bp, synthetic construct
  misc_feature 1..20: note = chemically synthesized
  source 1..20: mol_type = other DNA
gccctcagcacagactcttt

SEQ ID NO: 54553 - DNA, 20 bp, synthetic construct
  misc_feature 1..20: note = chemically synthesized
  source 1..20: mol_type = other DNA
tcagcacagactctttcaga

SEQ ID NO: 54554 - DNA, 20 bp, synthetic construct
  misc_feature 1..20: note = chemically synthesized
  source 1..20: mol_type = other DNA
agcacagactctttcagatg

SEQ ID NO: 54555 - DNA, 20 bp, synthetic construct
  misc_feature 1..20: note = chemically synthesized
  source 1..20: mol_type = other DNA
gcacagactctttcagatgg

SEQ ID NO: 54556 - DNA, 20 bp, synthetic construct
  misc_feature 1..20: note = chemically synthesized
  source 1..20: mol_type = other DNA
atatcacgtacaccatatgc

SEQ ID NO: 54557 - DNA, 20 bp, synthetic construct
  misc_feature 1..20: note = chemically synthesized
  source 1..20: mol_type = other DNA
accatatgcaagtttcccgc

SEQ ID NO: 54558 - DNA, 20 bp, synthetic construct
  misc_feature 1..20: note = chemically synthesized
  source 1..20: mol_type = other DNA
ccatatgcaagtttcccgcc

SEQ ID NO: 54559 - DNA, 20 bp, synthetic construct
  misc_feature 1..20: note = chemically synthesized
  source 1..20: mol_type = other DNA
atatgcaagtttcccgccag

SEQ ID NO: 54560 - DNA, 20 bp, synthetic construct
  misc_feature 1..20: note = chemically synthesized
  source 1..20: mol_type = other DNA
tatgcaagtttcccgccagg

SEQ ID NO: 54561 - DNA, 20 bp, synthetic construct
  misc_feature 1..20: note = chemically synthesized
  source 1..20: mol_type = other DNA
ctctacttgaatactctcac

SEQ ID NO: 54562 - DNA, 20 bp, synthetic construct
  misc_feature 1..20: note = chemically synthesized
  source 1..20: mol_type = other DNA
tacttgaatactctcacaag

SEQ ID NO: 54563 - DNA, 20 bp, synthetic construct
  misc_feature 1..20: note = chemically synthesized
  source 1..20: mol_type = other DNA
acttgaatactctcacaagt

SEQ ID NO: 54564 - DNA, 20 bp, synthetic construct
  misc_feature 1..20: note = chemically synthesized
  source 1..20: mol_type = other DNA
cttgaatactctcacaagta

SEQ ID NO: 54565 - DNA, 20 bp, synthetic construct
  misc_feature 1..20: note = chemically synthesized
  source 1..20: mol_type = other DNA
tgaatactctcacaagtagg

SEQ ID NO: 54566 - DNA, 20 bp, synthetic construct
  misc_feature 1..20: note = chemically synthesized
  source 1..20: mol_type = other DNA
agtagggagctcactcccac

SEQ ID NO: 54567 - DNA, 20 bp, synthetic construct
  misc_feature 1..20: note = chemically synthesized
  source 1..20: mol_type = other DNA
ggagctcactcccactggaa

SEQ ID NO: 54568 - DNA, 20 bp, synthetic construct
  misc_feature 1..20: note = chemically synthesized
  source 1..20: mol_type = other DNA
cagcccattttatctttgaa

SEQ ID NO: 54569 - DNA, 20 bp, synthetic construct
  misc_feature 1..20: note = chemically synthesized
  source 1..20: mol_type = other DNA
atctttgaatggtcttctgc

SEQ ID NO: 54570 - DNA, 20 bp, synthetic construct
  misc_feature 1..20: note = chemically synthesized
  source 1..20: mol_type = other DNA
gtcttctgccagcccatttt

SEQ ID NO: 54571 - DNA, 20 bp, synthetic construct
  misc_feature 1..20: note = chemically synthesized
  source 1..20: mol_type = other DNA
tcttctgccagcccattttg

SEQ ID NO: 54572 - DNA, 20 bp, synthetic construct
  misc_feature 1..20: note = chemically synthesized
  source 1..20: mol_type = other DNA
ctgccagcccattttgaggc

SEQ ID NO: 54573 - DNA, 20 bp, synthetic construct
  misc_feature 1..20: note = chemically synthesized
  source 1..20: mol_type = other DNA
gccagcccattttgaggcca

SEQ ID NO: 54574 - DNA, 20 bp, synthetic construct
  misc_feature 1..20: note = chemically synthesized
  source 1..20: mol_type = other DNA
ccagcccattttgaggccag

SEQ ID NO: 54575 - DNA, 20 bp, synthetic construct
  misc_feature 1..20: note = chemically synthesized
  source 1..20: mol_type = other DNA
tttgaggccagaggtgctgt

SEQ ID NO: 54576 - DNA, 20 bp, synthetic construct
  misc_feature 1..20: note = chemically synthesized
  source 1..20: mol_type = other DNA
ggccagaggtgctgtcagct

SEQ ID NO: 54577 - DNA, 20 bp, synthetic construct
  misc_feature 1..20: note = chemically synthesized
  source 1..20: mol_type = other DNA
gccagaggtgctgtcagctc

SEQ ID NO: 54578 - DNA, 20 bp, synthetic construct
  misc_feature 1..20: note = chemically synthesized
  source 1..20: mol_type = other DNA
agaggtgctgtcagctcagg

SEQ ID NO: 54579 - DNA, 20 bp, synthetic construct
  misc_feature 1..20: note = chemically synthesized
  source 1..20: mol_type = other DNA
ttttacaatcctaatcatat

SEQ ID NO: 54580 - DNA, 20 bp, synthetic construct
  misc_feature 1..20: note = chemically synthesized
  source 1..20: mol_type = other DNA
tttacaatcctaatcatatt

SEQ ID NO: 54581 - DNA, 20 bp, synthetic construct
  misc_feature 1..20: note = chemically synthesized
  source 1..20: mol_type = other DNA
tattgggtaatgtttttgaa

SEQ ID NO: 54582 - DNA, 20 bp, synthetic construct
  misc_feature 1..20: note = chemically synthesized
  source 1..20: mol_type = other DNA
atgtttttgaaaagctaatg

SEQ ID NO: 54583 - DNA, 20 bp, synthetic construct
  misc_feature 1..20: note = chemically synthesized
  source 1..20: mol_type = other DNA
gaaaagctaatgaagctatt

SEQ ID NO: 54584 - DNA, 20 bp, synthetic construct
  misc_feature 1..20: note = chemically synthesized
  source 1..20: mol_type = other DNA
agctaatgaagctattgaga

SEQ ID NO: 54585 - DNA, 20 bp, synthetic construct
  misc_feature 1..20: note = chemically synthesized
  source 1..20: mol_type = other DNA
tattgagaaagacctgttgc

SEQ ID NO: 54586 - DNA, 20 bp, synthetic construct
  misc_feature 1..20: note = chemically synthesized
  source 1..20: mol_type = other DNA
tgagaaagacctgttgctag

SEQ ID NO: 54587 - DNA, 20 bp, synthetic construct
  misc_feature 1..20: note = chemically synthesized
  source 1..20: mol_type = other DNA
aaagacctgttgctagaagt

SEQ ID NO: 54588 - DNA, 20 bp, synthetic construct
  misc_feature 1..20: note = chemically synthesized
  source 1..20: mol_type = other DNA
aagacctgttgctagaagtt

SEQ ID NO: 54589 - DNA, 20 bp, synthetic construct
  misc_feature 1..20: note = chemically synthesized
  source 1..20: mol_type = other DNA
tgctagaagttgggttgttc

SEQ ID NO: 54590 - DNA, 20 bp, synthetic construct
  misc_feature 1..20: note = chemically synthesized
  source 1..20: mol_type = other DNA
ttgttctggattttcccctg

SEQ ID NO: 54591 - DNA, 20 bp, synthetic construct
  misc_feature 1..20: note = chemically synthesized
  source 1..20: mol_type = other DNA
ttcttccgtcacatatacaa

SEQ ID NO: 54592 - DNA, 20 bp, synthetic construct
  misc_feature 1..20: note = chemically synthesized
  source 1..20: mol_type = other DNA
tccgtcacatatacaaaagc

SEQ ID NO: 54593 - DNA, 20 bp, synthetic construct
  misc_feature 1..20: note = chemically synthesized
  source 1..20: mol_type = other DNA
atatacaaaagcaagacttc

SEQ ID NO: 54594 - DNA, 20 bp, synthetic construct
  misc_feature 1..20: note = chemically synthesized
  source 1..20: mol_type = other DNA
tatacaaaagcaagacttcc

SEQ ID NO: 54595 - DNA, 20 bp, synthetic construct
  misc_feature 1..20: note = chemically synthesized
  source 1..20: mol_type = other DNA
acaaaagcaagacttccagg

SEQ ID NO: 54596 - DNA, 20 bp, synthetic construct
  misc_feature 1..20: note = chemically synthesized
  source 1..20: mol_type = other DNA
caaaagcaagacttccaggt

SEQ ID NO: 54597 - DNA, 20 bp, synthetic construct
  misc_feature 1..20: note = chemically synthesized
  source 1..20: mol_type = other DNA
aaaagcaagacttccaggta

SEQ ID NO: 54598 - DNA, 20 bp, synthetic construct
  misc_feature 1..20: note = chemically synthesized
  source 1..20: mol_type = other DNA
gcaagacttccaggtagggc

SEQ ID NO: 54599 - DNA, 20 bp, synthetic construct
  misc_feature 1..20: note = chemically synthesized
  source 1..20: mol_type = other DNA
tccaggtagggccagctcac

SEQ ID NO: 54600 - DNA, 20 bp, synthetic construct
  misc_feature 1..20: note = chemically synthesized
  source 1..20: mol_type = other DNA
gtagggccagctcacaagcc

SEQ ID NO: 54601 - DNA, 20 bp, synthetic construct
  misc_feature 1..20: note = chemically synthesized
  source 1..20: mol_type = other DNA
tagggccagctcacaagccc

SEQ ID NO: 54602 - DNA, 20 bp, synthetic construct
  misc_feature 1..20: note = chemically synthesized
  source 1..20: mol_type = other DNA
gccagctcacaagcccaggc

SEQ ID NO: 54603 - DNA, 20 bp, synthetic construct
  misc_feature 1..20: note = chemically synthesized
  source 1..20: mol_type = other DNA
cagctcacaagcccaggctg

SEQ ID NO: 54604 - DNA, 20 bp, synthetic construct
  misc_feature 1..20: note = chemically synthesized
  source 1..20: mol_type = other DNA
ccaggctggagatcctaact

SEQ ID NO: 54605 - DNA, 20 bp, synthetic construct
  misc_feature 1..20: note = chemically synthesized
  source 1..20: mol_type = other DNA
tacctgtgttcattcttacc

SEQ ID NO: 54606 - DNA, 20 bp, synthetic construct
  misc_feature 1..20: note = chemically synthesized
  source 1..20: mol_type = other DNA
gtgttcattcttaccgagaa

SEQ ID NO: 54607 - DNA, 20 bp, synthetic construct
  misc_feature 1..20: note = chemically synthesized
  source 1..20: mol_type = other DNA
tgttcattcttaccgagaaa

SEQ ID NO: 54608 - DNA, 20 bp, synthetic construct
  misc_feature 1..20: note = chemically synthesized
  source 1..20: mol_type = other DNA
ttcattcttaccgagaaaag

SEQ ID NO: 54609 - DNA, 20 bp, synthetic construct
  misc_feature 1..20: note = chemically synthesized
  source 1..20: mol_type = other DNA
ttcttaccgagaaaaggaga

SEQ ID NO: 54610 - DNA, 20 bp, synthetic construct
  misc_feature 1..20: note = chemically synthesized
  source 1..20: mol_type = other DNA
tcttaccgagaaaaggagaa

SEQ ID NO: 54611 - DNA, 20 bp, synthetic construct
  misc_feature 1..20: note = chemically synthesized
  source 1..20: mol_type = other DNA
ttaccgagaaaaggagaaag

SEQ ID NO: 54612 - DNA, 20 bp, synthetic construct
  misc_feature 1..20: note = chemically synthesized
  source 1..20: mol_type = other DNA
gaaaggagctctgaatctga

SEQ ID NO: 54613 - DNA, 20 bp, synthetic construct
  misc_feature 1..20: note = chemically synthesized
  source 1..20: mol_type = other DNA
aaaggagctctgaatctgat

SEQ ID NO: 54614 - DNA, 20 bp, synthetic construct
  misc_feature 1..20: note = chemically synthesized
  source 1..20: mol_type = other DNA
agctctgaatctgataggaa

SEQ ID NO: 54615 - DNA, 20 bp, synthetic construct
  misc_feature 1..20: note = chemically synthesized
  source 1..20: mol_type = other DNA
tctgaatctgataggaaaag

SEQ ID NO: 54616 - DNA, 20 bp, synthetic construct
  misc_feature 1..20: note = chemically synthesized
  source 1..20: mol_type = other DNA
ctgaatctgataggaaaaga

SEQ ID NO: 54617 - DNA, 20 bp, synthetic construct
  misc_feature 1..20: note = chemically synthesized
  source 1..20: mol_type = other DNA
ataggaaaagaaggctgcct

SEQ ID NO: 54618 - DNA, 20 bp, synthetic construct
  misc_feature 1..20: note = chemically synthesized
  source 1..20: mol_type = other DNA
taggaaaagaaggctgccta

SEQ ID NO: 54619 - DNA, 20 bp, synthetic construct
  misc_feature 1..20: note = chemically synthesized
  source 1..20: mol_type = other DNA
ggaaaagaaggctgcctaag

SEQ ID NO: 54620 - DNA, 20 bp, synthetic construct
  misc_feature 1..20: note = chemically synthesized
  source 1..20: mol_type = other DNA
gaaaagaaggctgcctaagg

SEQ ID NO: 54621 - DNA, 20 bp, synthetic construct
  misc_feature 1..20: note = chemically synthesized
  source 1..20: mol_type = other DNA
aaagaaggctgcctaaggag

SEQ ID NO: 54622 - DNA, 20 bp, synthetic construct
  misc_feature 1..20: note = chemically synthesized
  source 1..20: mol_type = other DNA
gctgcctaaggaggagtttt

SEQ ID NO: 54623 - DNA, 20 bp, synthetic construct
  misc_feature 1..20: note = chemically synthesized
  source 1..20: mol_type = other DNA
aaggaggagtttttagtatg

SEQ ID NO: 54624 - DNA, 20 bp, synthetic construct
  misc_feature 1..20: note = chemically synthesized
  source 1..20: mol_type = other DNA
tagtatgtggcgtatcatgc

SEQ ID NO: 54625 - DNA, 20 bp, synthetic construct
  misc_feature 1..20: note = chemically synthesized
  source 1..20: mol_type = other DNA
tatcatgcaagtgctatgcc

SEQ ID NO: 54626 - DNA, 20 bp, synthetic construct
  misc_feature 1..20: note = chemically synthesized
  source 1..20: mol_type = other DNA
tatgccaagccatgtctaaa

SEQ ID NO: 54627 - DNA, 20 bp, synthetic construct
  misc_feature 1..20: note = chemically synthesized
  source 1..20: mol_type = other DNA
tctaaatggctttaattata

SEQ ID NO: 54628 - DNA, 20 bp, synthetic construct
  misc_feature 1..20: note = chemically synthesized
  source 1..20: mol_type = other DNA
attatatagtaatgcactct

SEQ ID NO: 54629 - DNA, 20 bp, synthetic construct
  misc_feature 1..20: note = chemically synthesized
  source 1..20: mol_type = other DNA
tagtaatgcactctcagtaa

SEQ ID NO: 54630 - DNA, 20 bp, synthetic construct
  misc_feature 1..20: note = chemically synthesized
  source 1..20: mol_type = other DNA
agtaatgcactctcagtaat

SEQ ID NO: 54631 - DNA, 20 bp, synthetic construct
  misc_feature 1..20: note = chemically synthesized
  source 1..20: mol_type = other DNA
gtaatgcactctcagtaatg

SEQ ID NO: 54632 - DNA, 20 bp, synthetic construct
  misc_feature 1..20: note = chemically synthesized
  source 1..20: mol_type = other DNA
taatgcactctcagtaatgg

SEQ ID NO: 54633 - DNA, 20 bp, synthetic construct
  misc_feature 1..20: note = chemically synthesized
  source 1..20: mol_type = other DNA
cactctcagtaatgggggac

SEQ ID NO: 54634 - DNA, 20 bp, synthetic construct
  misc_feature 1..20: note = chemically synthesized
  source 1..20: mol_type = other DNA
cagtaatgggggaccagctt

SEQ ID NO: 54635 - DNA, 20 bp, synthetic construct
  misc_feature 1..20: note = chemically synthesized
  source 1..20: mol_type = other DNA
accagcttaagtataattaa

SEQ ID NO: 54636 - DNA, 20 bp, synthetic construct
  misc_feature 1..20: note = chemically synthesized
  source 1..20: mol_type = other DNA
gcttaagtataattaataga

SEQ ID NO: 54637 - DNA, 20 bp, synthetic construct
  misc_feature 1..20: note = chemically synthesized
  source 1..20: mol_type = other DNA
aagtataattaatagatggt

SEQ ID NO: 54638 - DNA, 20 bp, synthetic construct
  misc_feature 1..20: note = chemically synthesized
  source 1..20: mol_type = other DNA
tataattaatagatggttag

SEQ ID NO: 54639 - DNA, 20 bp, synthetic construct
  misc_feature 1..20: note = chemically synthesized
  source 1..20: mol_type = other DNA
ataattaatagatggttagt

SEQ ID NO: 54640 - DNA, 20 bp, synthetic construct
  misc_feature 1..20: note = chemically synthesized
  source 1..20: mol_type = other DNA
taattaatagatggttagtg

SEQ ID NO: 54641 - DNA, 20 bp, synthetic construct
  misc_feature 1..20: note = chemically synthesized
  source 1..20: mol_type = other DNA
tagtggggtaattctgcttc

SEQ ID NO: 54642 - DNA, 20 bp, synthetic construct
  misc_feature 1..20: note = chemically synthesized
  source 1..20: mol_type = other DNA
acatgttcatcgtatttcct

SEQ ID NO: 54643 - DNA, 20 bp, synthetic construct
  misc_feature 1..20: note = chemically synthesized
  source 1..20: mol_type = other DNA
tatttccttggatttctgaa

SEQ ID NO: 54644 - DNA, 20 bp, synthetic construct
  misc_feature 1..20: note = chemically synthesized
  source 1..20: mol_type = other DNA
cttggatttctgaatggctg

SEQ ID NO: 54645 - DNA, 20 bp, synthetic construct
  misc_feature 1..20: note = chemically synthesized
  source 1..20: mol_type = other DNA
tctgaatggctgcagtgacc

SEQ ID NO: 54646 - DNA, 20 bp, synthetic construct
  misc_feature 1..20: note = chemically synthesized
  source 1..20: mol_type = other DNA
cagtgacccagatattgcac

SEQ ID NO: 54647 - DNA, 20 bp, synthetic construct
  misc_feature 1..20: note = chemically synthesized
  source 1..20: mol_type = other DNA
agtgacccagatattgcact

SEQ ID NO: 54648 - DNA, 20 bp, synthetic construct
  misc_feature 1..20: note = chemically synthesized
  source 1..20: mol_type = other DNA
ttgcactaggtcaaaacatt

SEQ ID NO: 54649 - DNA, 20 bp, synthetic construct
  misc_feature 1..20: note = chemically synthesized
  source 1..20: mol_type = other DNA
tgcactaggtcaaaacattc

SEQ ID NO: 54650 - DNA, 20 bp, synthetic construct
  misc_feature 1..20: note = chemically synthesized
  source 1..20: mol_type = other DNA
taggtcaaaacattcaggta

SEQ ID NO: 54651 - DNA, 20 bp, synthetic construct
  misc_feature 1..20: note = chemically synthesized
  source 1..20: mol_type = other DNA
cattacatcatcctccttat

SEQ ID NO: 54652 - DNA, 20 bp, synthetic construct
  misc_feature 1..20: note = chemically synthesized
  source 1..20: mol_type = other DNA
catcatcctccttataagcc

SEQ ID NO: 54653 - DNA, 20 bp, synthetic construct
  misc_feature 1..20: note = chemically synthesized
  source 1..20: mol_type = other DNA
aagcccagctctgctttttc

SEQ ID NO: 54654 - DNA, 20 bp, synthetic construct
  misc_feature 1..20: note = chemically synthesized
  source 1..20: mol_type = other DNA
ctttttccagattcttccac

SEQ ID NO: 54655 - DNA, 20 bp, synthetic construct
  misc_feature 1..20: note = chemically synthesized
  source 1..20: mol_type = other DNA
tggctccacatccaccccac

SEQ ID NO: 54656 - DNA, 20 bp, synthetic construct
  misc_feature 1..20: note = chemically synthesized
  source 1..20: mol_type = other DNA
catccaccccactggatctt

SEQ ID NO: 54657 - DNA, 20 bp, synthetic construct
  misc_feature 1..20: note = chemically synthesized
  source 1..20: mol_type = other DNA
ccaccccactggatcttcag

SEQ ID NO: 54658 - DNA, 20 bp, synthetic construct
  misc_feature 1..20: note = chemically synthesized
  source 1..20: mol_type = other DNA
caccccactggatcttcaga

SEQ ID NO: 54659 - DNA, 20 bp, synthetic construct
  misc_feature 1..20: note = chemically synthesized
  source 1..20: mol_type = other DNA
ccactggatcttcagaaggc

SEQ ID NO: 54660 - DNA, 20 bp, synthetic construct
  misc_feature 1..20: note = chemically synthesized
  source 1..20: mol_type = other DNA
actggatcttcagaaggcta

SEQ ID NO: 54661 - DNA, 20 bp, synthetic construct
  misc_feature 1..20: note = chemically synthesized
  source 1..20: mol_type = other DNA
ctggatcttcagaaggctag

SEQ ID NO: 54662 - DNA, 20 bp, synthetic construct
  misc_feature 1..20: note = chemically synthesized
  source 1..20: mol_type = other DNA
tggatcttcagaaggctaga

SEQ ID NO: 54663 - DNA, 20 bp, synthetic construct
  misc_feature 1..20: note = chemically synthesized
  source 1..20: mol_type = other DNA
agaaggctagagggcgactc

SEQ ID NO: 54664 - DNA, 20 bp, synthetic construct
  misc_feature 1..20: note = chemically synthesized
  source 1..20: mol_type = other DNA
aggctagagggcgactctgg

SEQ ID NO: 54665 - DNA, 20 bp, synthetic construct
  misc_feature 1..20: note = chemically synthesized
  source 1..20: mol_type = other DNA
gtgcttttgtatgtttcaat

SEQ ID NO: 54666 - DNA, 20 bp, synthetic construct
  misc_feature 1..20: note = chemically synthesized
  source 1..20: mol_type = other DNA
tgcttttgtatgtttcaatt

SEQ ID NO: 54667 - DNA, 20 bp, synthetic construct
  misc_feature 1..20: note = chemically synthesized
  source 1..20: mol_type = other DNA
tcaattaggctctgaaatct

SEQ ID NO: 54668 - DNA, 20 bp, synthetic construct
  misc_feature 1..20: note = chemically synthesized
  source 1..20: mol_type = other DNA
caattaggctctgaaatctt

SEQ ID NO: 54669 - DNA, 20 bp, synthetic construct
  misc_feature 1..20: note = chemically synthesized
  source 1..20: mol_type = other DNA
gaaatcttgggcaaaatgac

SEQ ID NO: 54670 - DNA, 20 bp, synthetic construct
  misc_feature 1..20: note = chemically synthesized
  source 1..20: mol_type = other DNA
aaatcttgggcaaaatgaca

SEQ ID NO: 54671 - DNA, 20 bp, synthetic construct
  misc_feature 1..20: note = chemically synthesized
  source 1..20: mol_type = other DNA
aatcttgggcaaaatgacaa

SEQ ID NO: 54672 - DNA, 20 bp, synthetic construct
  misc_feature 1..20: note = chemically synthesized
  source 1..20: mol_type = other DNA
atcttgggcaaaatgacaag

SEQ ID NO: 54673 - DNA, 20 bp, synthetic construct
  misc_feature 1..20: note = chemically synthesized
  source 1..20: mol_type = other DNA
cttgggcaaaatgacaaggg

SEQ ID NO: 54674 - DNA, 20 bp, synthetic construct
  misc_feature 1..20: note = chemically synthesized
  source 1..20: mol_type = other DNA
ttgggcaaaatgacaagggg

SEQ ID NO: 54675 - DNA, 20 bp, synthetic construct
  misc_feature 1..20: note = chemically synthesized
  source 1..20: mol_type = other DNA
tgggcaaaatgacaagggga

SEQ ID NO: 54676 - DNA, 20 bp, synthetic construct
  misc_feature 1..20: note = chemically synthesized
  source 1..20: mol_type = other DNA
caaaatgacaaggggagggc

SEQ ID NO: 54677 - DNA, 20 bp, synthetic construct
  misc_feature 1..20: note = chemically synthesized
  source 1..20: mol_type = other DNA
aaaatgacaaggggagggcc

SEQ ID NO: 54678 - DNA, 20 bp, synthetic construct
  misc_feature 1..20: note = chemically synthesized
  source 1..20: mol_type = other DNA
gagggccaggattcctctct

SEQ ID NO: 54679 - DNA, 20 bp, synthetic construct
  misc_feature 1..20: note = chemically synthesized
  source 1..20: mol_type = other DNA
agggccaggattcctctctc

SEQ ID NO: 54680 - DNA, 20 bp, synthetic construct
  misc_feature 1..20: note = chemically synthesized
  source 1..20: mol_type = other DNA
attcctctctcaggtcactc

SEQ ID NO: 54681 - DNA, 20 bp, synthetic construct
  misc_feature 1..20: note = chemically synthesized
  source 1..20: mol_type = other DNA
ccagtgttacttttaattcc

SEQ ID NO: 54682 - DNA, 20 bp, synthetic construct
  misc_feature 1..20: note = chemically synthesized
  source 1..20: mol_type = other DNA
agtgttacttttaattccta

SEQ ID NO: 54683 - DNA, 20 bp, synthetic construct
  misc_feature 1..20: note = chemically synthesized
  source 1..20: mol_type = other DNA
gtgttacttttaattcctag

SEQ ID NO: 54684 - DNA, 20 bp, synthetic construct
  misc_feature 1..20: note = chemically synthesized
  source 1..20: mol_type = other DNA
tgttacttttaattcctaga

SEQ ID NO: 54685 - DNA, 20 bp, synthetic construct
  misc_feature 1..20: note = chemically synthesized
  source 1..20: mol_type = other DNA
atgactcctttctctatccc

SEQ ID NO: 54686 - DNA, 20 bp, synthetic construct
  misc_feature 1..20: note = chemically synthesized
  source 1..20: mol_type = other DNA
ttctctatcccaagccaacc

SEQ ID NO: 54687 - DNA, 20 bp, synthetic construct
  misc_feature 1..20: note = chemically synthesized
  source 1..20: mol_type = other DNA
ctctatcccaagccaaccaa

SEQ ID NO: 54688 - DNA, 20 bp, synthetic construct
  misc_feature 1..20: note = chemically synthesized
  source 1..20: mol_type = other DNA
caaccaagagcacattctta

SEQ ID NO: 54689 - DNA, 20 bp, synthetic construct
  misc_feature 1..20: note = chemically synthesized
  source 1..20: mol_type = other DNA
aaccaagagcacattcttaa

SEQ ID NO: 54690 - DNA, 20 bp, synthetic construct
  misc_feature 1..20: note = chemically synthesized
  source 1..20: mol_type = other DNA
agagcacattcttaaaggaa

SEQ ID NO: 54691 - DNA, 20 bp, synthetic construct
  misc_feature 1..20: note = chemically synthesized
  source 1..20: mol_type = other DNA
ctctcttttttttttttttt

SEQ ID NO: 54692 - DNA, 20 bp, synthetic construct
  misc_feature 1..20: note = chemically synthesized
  source 1..20: mol_type = other DNA
ctttttttttttttttgaga

SEQ ID NO: 54693 - DNA, 20 bp, synthetic construct
  misc_feature 1..20: note = chemically synthesized
  source 1..20: mol_type = other DNA
tttttttttttttttgagac

SEQ ID NO: 54694 - DNA, 20 bp, synthetic construct
  misc_feature 1..20: note = chemically synthesized
  source 1..20: mol_type = other DNA
ttttttttttttttgagaca

SEQ ID NO: 54695 - DNA, 20 bp, synthetic construct
  misc_feature 1..20: note = chemically synthesized
  source 1..20: mol_type = other DNA
cagggtctcactatgttgcc

SEQ ID NO: 54696 - DNA, 20 bp, synthetic construct
  misc_feature 1..20: note = chemically synthesized
  source 1..20: mol_type = other DNA
agggtctcactatgttgccc

SEQ ID NO: 54697 - DNA, 20 bp, synthetic construct
  misc_feature 1..20: note = chemically synthesized
  source 1..20: mol_type = other DNA
ccaggctgctcttgaattcc

SEQ ID NO: 54698 - DNA, 20 bp, synthetic construct
  misc_feature 1..20: note = chemically synthesized
  source 1..20: mol_type = other DNA
caggctgctcttgaattcct

SEQ ID NO: 54699 - DNA, 20 bp, synthetic construct
  misc_feature 1..20: note = chemically synthesized
  source 1..20: mol_type = other DNA
gctcttgaattcctgggctc

SEQ ID NO: 54700 - DNA, 20 bp, synthetic construct
  misc_feature 1..20: note = chemically synthesized
  source 1..20: mol_type = other DNA
cttgaattcctgggctcaag

SEQ ID NO: 54701 - DNA, 20 bp, synthetic construct
  misc_feature 1..20: note = chemically synthesized
  source 1..20: mol_type = other DNA
gcagtcctcccaccctacca

SEQ ID NO: 54702 - DNA, 20 bp, synthetic construct
  misc_feature 1..20: note = chemically synthesized
  source 1..20: mol_type = other DNA
ccctaccacagcgtcccgcg

SEQ ID NO: 54703 - DNA, 20 bp, synthetic construct
  misc_feature 1..20: note = chemically synthesized
  source 1..20: mol_type = other DNA
accacagcgtcccgcgtagc

SEQ ID NO: 54704 - DNA, 20 bp, synthetic construct
  misc_feature 1..20: note = chemically synthesized
  source 1..20: mol_type = other DNA
ccacagcgtcccgcgtagct

SEQ ID NO: 54705 - DNA, 20 bp, synthetic construct
  misc_feature 1..20: note = chemically synthesized
  source 1..20: mol_type = other DNA
gtcccgcgtagctgggacta

SEQ ID NO: 54706 - DNA, 20 bp, synthetic construct
  misc_feature 1..20: note = chemically synthesized
  source 1..20: mol_type = other DNA
tcccgcgtagctgggactac

SEQ ID NO: 54707 - DNA, 20 bp, synthetic construct
  misc_feature 1..20: note = chemically synthesized
  source 1..20: mol_type = other DNA
gtagctgggactacaggtgc

SEQ ID NO: 54708 - DNA, 20 bp, synthetic construct
  misc_feature 1..20: note = chemically synthesized
  source 1..20: mol_type = other DNA
caggtgcaagccactatgtc

SEQ ID NO: 54709 - DNA, 20 bp, synthetic construct
  misc_feature 1..20: note = chemically synthesized
  source 1..20: mol_type = other DNA
tgcaagccactatgtccagc

SEQ ID NO: 54710 - DNA, 20 bp, synthetic construct
  misc_feature 1..20: note = chemically synthesized
  source 1..20: mol_type = other DNA
ttctttttttttcttttttt

SEQ ID NO: 54711 - DNA, 20 bp, synthetic construct
  misc_feature 1..20: note = chemically synthesized
  source 1..20: mol_type = other DNA
ttttttttctttttttgaga

SEQ ID NO: 54712 - DNA, 20 bp, synthetic construct
  misc_feature 1..20: note = chemically synthesized
  source 1..20: mol_type = other DNA
gagacggcgcacctatcacc

SEQ ID NO: 54713 - DNA, 20 bp, synthetic construct
  misc_feature 1..20: note = chemically synthesized
  source 1..20: mol_type = other DNA
agacggcgcacctatcaccc

SEQ ID NO: 54714 - DNA, 20 bp, synthetic construct
  misc_feature 1..20: note = chemically synthesized
  source 1..20: mol_type = other DNA
ggcgcacctatcacccaggc

SEQ ID NO: 54715 - DNA, 20 bp, synthetic construct
  misc_feature 1..20: note = chemically synthesized
  source 1..20: mol_type = other DNA
cgcacctatcacccaggctg

SEQ ID NO: 54716 - DNA, 20 bp, synthetic construct
  misc_feature 1..20: note = chemically synthesized
  source 1..20: mol_type = other DNA
acctatcacccaggctggag

SEQ ID NO: 54717 - DNA, 20 bp, synthetic construct
  misc_feature 1..20: note = chemically synthesized
  source 1..20: mol_type = other DNA
ctatcacccaggctggagtg

SEQ ID NO: 54718 - DNA, 20 bp, synthetic construct
  misc_feature 1..20: note = chemically synthesized
  source 1..20: mol_type = other DNA
tcacccaggctggagtggag

SEQ ID NO: 54719 - DNA, 20 bp, synthetic construct
  misc_feature 1..20: note = chemically synthesized
  source 1..20: mol_type = other DNA
ggagtggagtggcacgatct

SEQ ID NO: 54720 - DNA, 20 bp, synthetic construct
  misc_feature 1..20: note = chemically synthesized
  source 1..20: mol_type = other DNA
tcactgcaacctcttcctcc

SEQ ID NO: 54721 - DNA, 20 bp, synthetic construct
  misc_feature 1..20: note = chemically synthesized
  source 1..20: mol_type = other DNA
caacctcttcctcctggttc

SEQ ID NO: 54722 - DNA, 20 bp, synthetic construct
  misc_feature 1..20: note = chemically synthesized
  source 1..20: mol_type = other DNA
ttcaagcgattctcatgtct

SEQ ID NO: 54723 - DNA, 20 bp, synthetic construct
  misc_feature 1..20: note = chemically synthesized
  source 1..20: mol_type = other DNA
ttctcatgtctcagcctcct

SEQ ID NO: 54724 - DNA, 20 bp, synthetic construct
  misc_feature 1..20: note = chemically synthesized
  source 1..20: mol_type = other DNA
tcatgtctcagcctcctcag

SEQ ID NO: 54725 - DNA, 20 bp, synthetic construct
  misc_feature 1..20: note = chemically synthesized
  source 1..20: mol_type = other DNA
gtctcagcctcctcagtagc

SEQ ID NO: 54726 - DNA, 20 bp, synthetic construct
  misc_feature 1..20: note = chemically synthesized
  source 1..20: mol_type = other DNA
tctcagcctcctcagtagct

SEQ ID NO: 54727 - DNA, 20 bp, synthetic construct
  misc_feature 1..20: note = chemically synthesized
  source 1..20: mol_type = other DNA
tcctcagtagctaggactac

SEQ ID NO: 54728 - DNA, 20 bp, synthetic construct
  misc_feature 1..20: note = chemically synthesized
  source 1..20: mol_type = other DNA
accggcgtgcaccaccatgc

SEQ ID NO: 54729 - DNA, 20 bp, synthetic construct
  misc_feature 1..20: note = chemically synthesized
  source 1..20: mol_type = other DNA
ccggcgtgcaccaccatgcc

SEQ ID NO: 54730 - DNA, 20 bp, synthetic construct
  misc_feature 1..20: note = chemically synthesized
  source 1..20: mol_type = other DNA
caggctaatttttatatttt

SEQ ID NO: 54731 - DNA, 20 bp, synthetic construct
  misc_feature 1..20: note = chemically synthesized
  source 1..20: mol_type = other DNA
tttttatatttttagaattt

SEQ ID NO: 54732 - DNA, 20 bp, synthetic construct
  misc_feature 1..20: note = chemically synthesized
  source 1..20: mol_type = other DNA
ttatatttttagaattttag

SEQ ID NO: 54733 - DNA, 20 bp, synthetic construct
  misc_feature 1..20: note = chemically synthesized
  source 1..20: mol_type = other DNA
atatttttagaattttagaa

SEQ ID NO: 54734 - DNA, 20 bp, synthetic construct
  misc_feature 1..20: note = chemically synthesized
  source 1..20: mol_type = other DNA
ttttagaattttagaagaga

SEQ ID NO: 54735 - DNA, 20 bp, synthetic construct
  misc_feature 1..20: note = chemically synthesized
  source 1..20: mol_type = other DNA
tttagaattttagaagagat

SEQ ID NO: 54736 - DNA, 20 bp, synthetic construct
  misc_feature 1..20: note = chemically synthesized
  source 1..20: mol_type = other DNA
gagatgggatttcatcatgt

SEQ ID NO: 54737 - DNA, 20 bp, synthetic construct
  misc_feature 1..20: note = chemically synthesized
  source 1..20: mol_type = other DNA
tgggatttcatcatgttggc

SEQ ID NO: 54738 - DNA, 20 bp, synthetic construct
  misc_feature 1..20: note = chemically synthesized
  source 1..20: mol_type = other DNA
gggatttcatcatgttggcc

SEQ ID NO: 54739 - DNA, 20 bp, synthetic construct
  misc_feature 1..20: note = chemically synthesized
  source 1..20: mol_type = other DNA
tttcatcatgttggccaggc

SEQ ID NO: 54740 - DNA, 20 bp, synthetic construct
  misc_feature 1..20: note = chemically synthesized
  source 1..20: mol_type = other DNA
ggtctcgaactcctgacctc

SEQ ID NO: 54741 - DNA, 20 bp, synthetic construct
  misc_feature 1..20: note = chemically synthesized
  source 1..20: mol_type = other DNA
ctcaagtgatccacctgcct

SEQ ID NO: 54742 - DNA, 20 bp, synthetic construct
  misc_feature 1..20: note = chemically synthesized
  source 1..20: mol_type = other DNA
tccacctgccttggcctccc

SEQ ID NO: 54743 - DNA, 20 bp, synthetic construct
  misc_feature 1..20: note = chemically synthesized
  source 1..20: mol_type = other DNA
ccacctgccttggcctccca

SEQ ID NO: 54744 - DNA, 20 bp, synthetic construct
  misc_feature 1..20: note = chemically synthesized
  source 1..20: mol_type = other DNA
gccttggcctcccaaggtgc

SEQ ID NO: 54745 - DNA, 20 bp, synthetic construct
  misc_feature 1..20: note = chemically synthesized
  source 1..20: mol_type = other DNA
ccttggcctcccaaggtgct

SEQ ID NO: 54746 - DNA, 20 bp, synthetic construct
  misc_feature 1..20: note = chemically synthesized
  source 1..20: mol_type = other DNA
ctcccaaggtgctaggatta

SEQ ID NO: 54747 - DNA, 20 bp, synthetic construct
  misc_feature 1..20: note = chemically synthesized
  source 1..20: mol_type = other DNA
tcccaaggtgctaggattac

SEQ ID NO: 54748 - DNA, 20 bp, synthetic construct
  misc_feature 1..20: note = chemically synthesized
  source 1..20: mol_type = other DNA
ggtgctaggattacaggcat

SEQ ID NO: 54749 - DNA, 20 bp, synthetic construct
  misc_feature 1..20: note = chemically synthesized
  source 1..20: mol_type = other DNA
acaggcatgagccaccgcac

SEQ ID NO: 54750 - DNA, 20 bp, synthetic construct
  misc_feature 1..20: note = chemically synthesized
  source 1..20: mol_type = other DNA
caggcatgagccaccgcacc

SEQ ID NO: 54751 - DNA, 20 bp, synthetic construct
  misc_feature 1..20: note = chemically synthesized
  source 1..20: mol_type = other DNA
tttcaatctcatctgatatg

SEQ ID NO: 54752 - DNA, 20 bp, synthetic construct
  misc_feature 1..20: note = chemically synthesized
  source 1..20: mol_type = other DNA
tcaatctcatctgatatgca

SEQ ID NO: 54753 - DNA, 20 bp, synthetic construct
  misc_feature 1..20: note = chemically synthesized
  source 1..20: mol_type = other DNA
acccacctaccccccaaaaa

SEQ ID NO: 54754 - DNA, 20 bp, synthetic construct
  misc_feature 1..20: note = chemically synthesized
  source 1..20: mol_type = other DNA
ctaccccccaaaaaaagctg

SEQ ID NO: 54755 - DNA, 20 bp, synthetic construct
  misc_feature 1..20: note = chemically synthesized
  source 1..20: mol_type = other DNA
gctgaagcctatttatttga

SEQ ID NO: 54756 - DNA, 20 bp, synthetic construct
  misc_feature 1..20: note = chemically synthesized
  source 1..20: mol_type = other DNA
tgtttttgctactaattata

SEQ ID NO: 54757 - DNA, 20 bp, synthetic construct
  misc_feature 1..20: note = chemically synthesized
  source 1..20: mol_type = other DNA
ctgctcataacatctttgaa

SEQ ID NO: 54758 - DNA, 20 bp, synthetic construct
  misc_feature 1..20: note = chemically synthesized
  source 1..20: mol_type = other DNA
aaaagaaaaatatatatgtg

SEQ ID NO: 54759 - DNA, 20 bp, synthetic construct
  misc_feature 1..20: note = chemically synthesized
  source 1..20: mol_type = other DNA
atatgtgcagtattttatta

SEQ ID NO: 54760 - DNA, 20 bp, synthetic construct
  misc_feature 1..20: note = chemically synthesized
  source 1..20: mol_type = other DNA
attaaagcaacattttattt

SEQ ID NO: 54761 - DNA, 20 bp, synthetic construct
  misc_feature 1..20: note = chemically synthesized
  source 1..20: mol_type = other DNA
caacattttatttaagaata

SEQ ID NO: 54762 - DNA, 20 bp, synthetic construct
  misc_feature 1..20: note = chemically synthesized
  source 1..20: mol_type = other DNA
tcttgttaattactatattt

SEQ ID NO: 54763 - DNA, 20 bp, synthetic construct
  misc_feature 1..20: note = chemically synthesized
  source 1..20: mol_type = other DNA
tttagatgcaatgtgatctg

SEQ ID NO: 54764 - DNA, 20 bp, synthetic construct
  misc_feature 1..20: note = chemically synthesized
  source 1..20: mol_type = other DNA
tgatctgaagtttctaattc

SEQ ID NO: 54765 - DNA, 20 bp, synthetic construct
  misc_feature 1..20: note = chemically synthesized
  source 1..20: mol_type = other DNA
ttctggcccaactaaatttc

SEQ ID NO: 54766 - DNA, 20 bp, synthetic construct
  misc_feature 1..20: note = chemically synthesized
  source 1..20: mol_type = other DNA
gtttccctaaacaaataatt

SEQ ID NO: 54767 - DNA, 20 bp, synthetic construct
  misc_feature 1..20: note = chemically synthesized
  source 1..20: mol_type = other DNA
ctgtgcctgcattttccctt

SEQ ID NO: 54768 - DNA, 20 bp, synthetic construct
  misc_feature 1..20: note = chemically synthesized
  source 1..20: mol_type = other DNA
gtgcctgcattttccctttg

SEQ ID NO: 54769 - DNA, 20 bp, synthetic construct
  misc_feature 1..20: note = chemically synthesized
  source 1..20: mol_type = other DNA
cctgcattttccctttggag

SEQ ID NO: 54770 - DNA, 20 bp, synthetic construct
  misc_feature 1..20: note = chemically synthesized
  source 1..20: mol_type = other DNA
attttccctttggagaagaa

SEQ ID NO: 54771 - DNA, 20 bp, synthetic construct
  misc_feature 1..20: note = chemically synthesized
  source 1..20: mol_type = other DNA
gaagaaaagtgctctctctt

SEQ ID NO: 54772 - DNA, 20 bp, synthetic construct
  misc_feature 1..20: note = chemically synthesized
  source 1..20: mol_type = other DNA
tgctctctcttgagttgacc

SEQ ID NO: 54773 - DNA, 20 bp, synthetic construct
  misc_feature 1..20: note = chemically synthesized
  source 1..20: mol_type = other DNA
ctctctcttgagttgaccga

SEQ ID NO: 54774 - DNA, 20 bp, synthetic construct
  misc_feature 1..20: note = chemically synthesized
  source 1..20: mol_type = other DNA
gagttgaccgagagtcccat

SEQ ID NO: 54775 - DNA, 20 bp, synthetic construct
  misc_feature 1..20: note = chemically synthesized
  source 1..20: mol_type = other DNA
agttgaccgagagtcccatt

SEQ ID NO: 54776 - DNA, 20 bp, synthetic construct
  misc_feature 1..20: note = chemically synthesized
  source 1..20: mol_type = other DNA
gttgaccgagagtcccatta

SEQ ID NO: 54777 - DNA, 20 bp, synthetic construct
  misc_feature 1..20: note = chemically synthesized
  source 1..20: mol_type = other DNA
accgagagtcccattaggga

SEQ ID NO: 54778 - DNA, 20 bp, synthetic construct
  misc_feature 1..20: note = chemically synthesized
  source 1..20: mol_type = other DNA
ccgagagtcccattagggat

SEQ ID NO: 54779 - DNA, 20 bp, synthetic construct
  misc_feature 1..20: note = chemically synthesized
  source 1..20: mol_type = other DNA
cgagagtcccattagggata

SEQ ID NO: 54780 - DNA, 20 bp, synthetic construct
  misc_feature 1..20: note = chemically synthesized
  source 1..20: mol_type = other DNA
agagtcccattagggatagg

SEQ ID NO: 54781 - DNA, 20 bp, synthetic construct
  misc_feature 1..20: note = chemically synthesized
  source 1..20: mol_type = other DNA
gggagacttaaatgcatcca

SEQ ID NO: 54782 - DNA, 20 bp, synthetic construct
  misc_feature 1..20: note = chemically synthesized
  source 1..20: mol_type = other DNA
ggagacttaaatgcatccac

SEQ ID NO: 54783 - DNA, 20 bp, synthetic construct
  misc_feature 1..20: note = chemically synthesized
  source 1..20: mol_type = other DNA
gagacttaaatgcatccaca

SEQ ID NO: 54784 - DNA, 20 bp, synthetic construct
  misc_feature 1..20: note = chemically synthesized
  source 1..20: mol_type = other DNA
agacttaaatgcatccacag

SEQ ID NO: 54785 - DNA, 20 bp, synthetic construct
  misc_feature 1..20: note = chemically synthesized
  source 1..20: mol_type = other DNA
taaatgcatccacaggggca

SEQ ID NO: 54786 - DNA, 20 bp, synthetic construct
  misc_feature 1..20: note = chemically synthesized
  source 1..20: mol_type = other DNA
aaatgcatccacaggggcac

SEQ ID NO: 54787 - DNA, 20 bp, synthetic construct
  misc_feature 1..20: note = chemically synthesized
  source 1..20: mol_type = other DNA
tgcatccacaggggcacagg

SEQ ID NO: 54788 - DNA, 20 bp, synthetic construct
  misc_feature 1..20: note = chemically synthesized
  source 1..20: mol_type = other DNA
catccacaggggcacaggca

SEQ ID NO: 54789 - DNA, 20 bp, synthetic construct
  misc_feature 1..20: note = chemically synthesized
  source 1..20: mol_type = other DNA
acaggggcacaggcagagtt

SEQ ID NO: 54790 - DNA, 20 bp, synthetic construct
  misc_feature 1..20: note = chemically synthesized
  source 1..20: mol_type = other DNA
ggcagagttgagcacataaa

SEQ ID NO: 54791 - DNA, 20 bp, synthetic construct
  misc_feature 1..20: note = chemically synthesized
  source 1..20: mol_type = other DNA
cagagttgagcacataaacg

SEQ ID NO: 54792 - DNA, 20 bp, synthetic construct
  misc_feature 1..20: note = chemically synthesized
  source 1..20: mol_type = other DNA
agagttgagcacataaacgg

SEQ ID NO: 54793 - DNA, 20 bp, synthetic construct
  misc_feature 1..20: note = chemically synthesized
  source 1..20: mol_type = other DNA
cataaacggaggcccaaaat

SEQ ID NO: 54794 - DNA, 20 bp, synthetic construct
  misc_feature 1..20: note = chemically synthesized
  source 1..20: mol_type = other DNA
acggaggcccaaaatcagca

SEQ ID NO: 54795 - DNA, 20 bp, synthetic construct
  misc_feature 1..20: note = chemically synthesized
  source 1..20: mol_type = other DNA
gcccaaaatcagcatagaac

SEQ ID NO: 54796 - DNA, 20 bp, synthetic construct
  misc_feature 1..20: note = chemically synthesized
  source 1..20: mol_type = other DNA
aaaatcagcatagaaccaga

SEQ ID NO: 54797 - DNA, 20 bp, synthetic construct
  misc_feature 1..20: note = chemically synthesized
  source 1..20: mol_type = other DNA
agcatagaaccagaaagatt

SEQ ID NO: 54798 - DNA, 20 bp, synthetic construct
  misc_feature 1..20: note = chemically synthesized
  source 1..20: mol_type = other DNA
catagaaccagaaagattca

SEQ ID NO: 54799 - DNA, 20 bp, synthetic construct
  misc_feature 1..20: note = chemically synthesized
  source 1..20: mol_type = other DNA
gaaccagaaagattcagagt

SEQ ID NO: 54800 - DNA, 20 bp, synthetic construct
  misc_feature 1..20: note = chemically synthesized
  source 1..20: mol_type = other DNA
agaaagattcagagttggcc

SEQ ID NO: 54801 - DNA, 20 bp, synthetic construct
  misc_feature 1..20: note = chemically synthesized
  source 1..20: mol_type = other DNA
agttggccaagaatgaacat

SEQ ID NO: 54802 - DNA, 20 bp, synthetic construct
  misc_feature 1..20: note = chemically synthesized
  source 1..20: mol_type = other DNA
caagaatgaacattggctac

SEQ ID NO: 54803 - DNA, 20 bp, synthetic construct
  misc_feature 1..20: note = chemically synthesized
  source 1..20: mol_type = other DNA
aacattggctaccagaccac

SEQ ID NO: 54804 - DNA, 20 bp, synthetic construct
  misc_feature 1..20: note = chemically synthesized
  source 1..20: mol_type = other DNA
ttggctaccagaccacaagt

SEQ ID NO: 54805 - DNA, 20 bp, synthetic construct
  misc_feature 1..20: note = chemically synthesized
  source 1..20: mol_type = other DNA
accagaccacaagtcagcat

SEQ ID NO: 54806 - DNA, 20 bp, synthetic construct
  misc_feature 1..20: note = chemically synthesized
  source 1..20: mol_type = other DNA
agtcagcatgagttgctcta

SEQ ID NO: 54807 - DNA, 20 bp, synthetic construct
  misc_feature 1..20: note = chemically synthesized
  source 1..20: mol_type = other DNA
atggcatcaaattgcaactt

SEQ ID NO: 54808 - DNA, 20 bp, synthetic construct
  misc_feature 1..20: note = chemically synthesized
  source 1..20: mol_type = other DNA
ggcatcaaattgcaacttga

SEQ ID NO: 54809 - DNA, 20 bp, synthetic construct
  misc_feature 1..20: note = chemically synthesized
  source 1..20: mol_type = other DNA
atcaaattgcaacttgagag

SEQ ID NO: 54810 - DNA, 20 bp, synthetic construct
  misc_feature 1..20: note = chemically synthesized
  source 1..20: mol_type = other DNA
aattgcaacttgagagtaga

SEQ ID NO: 54811 - DNA, 20 bp, synthetic construct
  misc_feature 1..20: note = chemically synthesized
  source 1..20: mol_type = other DNA
attgcaacttgagagtagat

SEQ ID NO: 54812 - DNA, 20 bp, synthetic construct
  misc_feature 1..20: note = chemically synthesized
  source 1..20: mol_type = other DNA
gcaacttgagagtagatggg

SEQ ID NO: 54813 - DNA, 20 bp, synthetic construct
  misc_feature 1..20: note = chemically synthesized
  source 1..20: mol_type = other DNA
caacttgagagtagatgggc

SEQ ID NO: 54814 - DNA, 20 bp, synthetic construct
  misc_feature 1..20: note = chemically synthesized
  source 1..20: mol_type = other DNA
aacttgagagtagatgggca

SEQ ID NO: 54815 - DNA, 20 bp, synthetic construct
  misc_feature 1..20: note = chemically synthesized
  source 1..20: mol_type = other DNA
ggcagggtcactatcaaatt

SEQ ID NO: 54816 - DNA, 20 bp, synthetic construct
  misc_feature 1..20: note = chemically synthesized
  source 1..20: mol_type = other DNA
tcactatcaaattaagcaat

SEQ ID NO: 54817 - DNA, 20 bp, synthetic construct
  misc_feature 1..20: note = chemically synthesized
  source 1..20: mol_type = other DNA
cactatcaaattaagcaatc

SEQ ID NO: 54818 - DNA, 20 bp, synthetic construct
  misc_feature 1..20: note = chemically synthesized
  source 1..20: mol_type = other DNA
actatcaaattaagcaatca

SEQ ID NO: 54819 - DNA, 20 bp, synthetic construct
  misc_feature 1..20: note = chemically synthesized
  source 1..20: mol_type = other DNA
attaagcaatcagggcacac

SEQ ID NO: 54820 - DNA, 20 bp, synthetic construct
  misc_feature 1..20: note = chemically synthesized
  source 1..20: mol_type = other DNA
caatcagggcacacaagttg

SEQ ID NO: 54821 - DNA, 20 bp, synthetic construct
  misc_feature 1..20: note = chemically synthesized
  source 1..20: mol_type = other DNA
acaagttgcagtaacacaac

SEQ ID NO: 54822 - DNA, 20 bp, synthetic construct
  misc_feature 1..20: note = chemically synthesized
  source 1..20: mol_type = other DNA
ttgcagtaacacaacaagac

SEQ ID NO: 54823 - DNA, 20 bp, synthetic construct
  misc_feature 1..20: note = chemically synthesized
  source 1..20: mol_type = other DNA
tgcagtaacacaacaagact

SEQ ID NO: 54824 - DNA, 20 bp, synthetic construct
  misc_feature 1..20: note = chemically synthesized
  source 1..20: mol_type = other DNA
gtaacacaacaagactaggc

SEQ ID NO: 54825 - DNA, 20 bp, synthetic construct
  misc_feature 1..20: note = chemically synthesized
  source 1..20: mol_type = other DNA
caacaagactaggccagctc

SEQ ID NO: 54826 - DNA, 20 bp, synthetic construct
  misc_feature 1..20: note = chemically synthesized
  source 1..20: mol_type = other DNA
actaggccagctctggaatc

SEQ ID NO: 54827 - DNA, 20 bp, synthetic construct
  misc_feature 1..20: note = chemically synthesized
  source 1..20: mol_type = other DNA
agctctggaatccagtaact

SEQ ID NO: 54828 - DNA, 20 bp, synthetic construct
  misc_feature 1..20: note = chemically synthesized
  source 1..20: mol_type = other DNA
ggaatccagtaactcagtgt

SEQ ID NO: 54829 - DNA, 20 bp, synthetic construct
  misc_feature 1..20: note = chemically synthesized
  source 1..20: mol_type = other DNA
tccagtaactcagtgtcagc

SEQ ID NO: 54830 - DNA, 20 bp, synthetic construct
  misc_feature 1..20: note = chemically synthesized
  source 1..20: mol_type = other DNA
ccagtaactcagtgtcagca

SEQ ID NO: 54831 - DNA, 20 bp, synthetic construct
  misc_feature 1..20: note = chemically synthesized
  source 1..20: mol_type = other DNA
actcagtgtcagcaaggttt

SEQ ID NO: 54832 - DNA, 20 bp, synthetic construct
  misc_feature 1..20: note = chemically synthesized
  source 1..20: mol_type = other DNA
ctcagtgtcagcaaggtttt

SEQ ID NO: 54833 - DNA, 20 bp, synthetic construct
  misc_feature 1..20: note = chemically synthesized
  source 1..20: mol_type = other DNA
gtcagcaaggttttgggtta

SEQ ID NO: 54834 - DNA, 20 bp, synthetic construct
  misc_feature 1..20: note = chemically synthesized
  source 1..20: mol_type = other DNA
aaggttttgggttatagttc

SEQ ID NO: 54835 - DNA, 20 bp, synthetic construct
  misc_feature 1..20: note = chemically synthesized
  source 1..20: mol_type = other DNA
ttttgggttatagttcaaga

SEQ ID NO: 54836 - DNA, 20 bp, synthetic construct
  misc_feature 1..20: note = chemically synthesized
  source 1..20: mol_type = other DNA
atagttcaagaaagtctaaa

SEQ ID NO: 54837 - DNA, 20 bp, synthetic construct
  misc_feature 1..20: note = chemically synthesized
  source 1..20: mol_type = other DNA
agttcaagaaagtctaaaca

SEQ ID NO: 54838 - DNA, 20 bp, synthetic construct
  misc_feature 1..20: note = chemically synthesized
  source 1..20: mol_type = other DNA
caagaaagtctaaacagagc

SEQ ID NO: 54839 - DNA, 20 bp, synthetic construct
  misc_feature 1..20: note = chemically synthesized
  source 1..20: mol_type = other DNA
agtctaaacagagccagtca

SEQ ID NO: 54840 - DNA, 20 bp, synthetic construct
  misc_feature 1..20: note = chemically synthesized
  source 1..20: mol_type = other DNA
acagagccagtcacagcacc

SEQ ID NO: 54841 - DNA, 20 bp, synthetic construct
  misc_feature 1..20: note = chemically synthesized
  source 1..20: mol_type = other DNA
cagagccagtcacagcacca

SEQ ID NO: 54842 - DNA, 20 bp, synthetic construct
  misc_feature 1..20: note = chemically synthesized
  source 1..20: mol_type = other DNA
cacagcaccaaggaatgctc

SEQ ID NO: 54843 - DNA, 20 bp, synthetic construct
  misc_feature 1..20: note = chemically synthesized
  source 1..20: mol_type = other DNA
acagcaccaaggaatgctca

SEQ ID NO: 54844 - DNA, 20 bp, synthetic construct
  misc_feature 1..20: note = chemically synthesized
  source 1..20: mol_type = other DNA
cagcaccaaggaatgctcaa

SEQ ID NO: 54845 - DNA, 20 bp, synthetic construct
  misc_feature 1..20: note = chemically synthesized
  source 1..20: mol_type = other DNA
gcaccaaggaatgctcaagg

SEQ ID NO: 54846 - DNA, 20 bp, synthetic construct
  misc_feature 1..20: note = chemically synthesized
  source 1..20: mol_type = other DNA
aatgctcaagggagctattg

SEQ ID NO: 54847 - DNA, 20 bp, synthetic construct
  misc_feature 1..20: note = chemically synthesized
  source 1..20: mol_type = other DNA
atgctcaagggagctattgc

SEQ ID NO: 54848 - DNA, 20 bp, synthetic construct
  misc_feature 1..20: note = chemically synthesized
  source 1..20: mol_type = other DNA
ctattgcaggtttctctgct

SEQ ID NO: 54849 - DNA, 20 bp, synthetic construct
  misc_feature 1..20: note = chemically synthesized
  source 1..20: mol_type = other DNA
attgcaggtttctctgctaa

SEQ ID NO: 54850 - DNA, 20 bp, synthetic construct
  misc_feature 1..20: note = chemically synthesized
  source 1..20: mol_type = other DNA
ctaagagatttatttcatcc

SEQ ID NO: 54851 - DNA, 20 bp, synthetic construct
  misc_feature 1..20: note = chemically synthesized
  source 1..20: mol_type = other DNA
taagagatttatttcatcct

SEQ ID NO: 54852 - DNA, 20 bp, synthetic construct
  misc_feature 1..20: note = chemically synthesized
  source 1..20: mol_type = other DNA
gatttatttcatcctgggtg

SEQ ID NO: 54853 - DNA, 20 bp, synthetic construct
  misc_feature 1..20: note = chemically synthesized
  source 1..20: mol_type = other DNA
atttatttcatcctgggtgc

SEQ ID NO: 54854 - DNA, 20 bp, synthetic construct
  misc_feature 1..20: note = chemically synthesized
  source 1..20: mol_type = other DNA
tttatttcatcctgggtgca

SEQ ID NO: 54855 - DNA, 20 bp, synthetic construct
  misc_feature 1..20: note = chemically synthesized
  source 1..20: mol_type = other DNA
ggtgcagggttcgacctcca

SEQ ID NO: 54856 - DNA, 20 bp, synthetic construct
  misc_feature 1..20: note = chemically synthesized
  source 1..20: mol_type = other DNA
gtgcagggttcgacctccaa

SEQ ID NO: 54857 - DNA, 20 bp, synthetic construct
  misc_feature 1..20: note = chemically synthesized
  source 1..20: mol_type = other DNA
tcaaatcatcaccgtatcaa

SEQ ID NO: 54858 - DNA, 20 bp, synthetic construct
  misc_feature 1..20: note = chemically synthesized
  source 1..20: mol_type = other DNA
accgtatcaatggatttcct

SEQ ID NO: 54859 - DNA, 20 bp, synthetic construct
  misc_feature 1..20: note = chemically synthesized
  source 1..20: mol_type = other DNA
ccgtatcaatggatttcctg

SEQ ID NO: 54860 - DNA, 20 bp, synthetic construct
  misc_feature 1..20: note = chemically synthesized
  source 1..20: mol_type = other DNA
cgtatcaatggatttcctga

SEQ ID NO: 54861 - DNA, 20 bp, synthetic construct
  misc_feature 1..20: note = chemically synthesized
  source 1..20: mol_type = other DNA
tcaatggatttcctgagggt

SEQ ID NO: 54862 - DNA, 20 bp, synthetic construct
  misc_feature 1..20: note = chemically synthesized
  source 1..20: mol_type = other DNA
gctatttcacacctgaactc

SEQ ID NO: 54863 - DNA, 20 bp, synthetic construct
  misc_feature 1..20: note = chemically synthesized
  source 1..20: mol_type = other DNA
tatttcacacctgaactccg

SEQ ID NO: 54864 - DNA, 20 bp, synthetic construct
  misc_feature 1..20: note = chemically synthesized
  source 1..20: mol_type = other DNA
aactccggagtctgtatatt

SEQ ID NO: 54865 - DNA, 20 bp, synthetic construct
  misc_feature 1..20: note = chemically synthesized
  source 1..20: mol_type = other DNA
actccggagtctgtatattc

SEQ ID NO: 54866 - DNA, 20 bp, synthetic construct
  misc_feature 1..20: note = chemically synthesized
  source 1..20: mol_type = other DNA
ctccggagtctgtatattca

SEQ ID NO: 54867 - DNA, 20 bp, synthetic construct
  misc_feature 1..20: note = chemically synthesized
  source 1..20: mol_type = other DNA
cggagtctgtatattcaggg

SEQ ID NO: 54868 - DNA, 20 bp, synthetic construct
  misc_feature 1..20: note = chemically synthesized
  source 1..20: mol_type = other DNA
ggaagattgcattctcctac

SEQ ID NO: 54869 - DNA, 20 bp, synthetic construct
  misc_feature 1..20: note = chemically synthesized
  source 1..20: mol_type = other DNA
ttgcattctcctactggatt

SEQ ID NO: 54870 - DNA, 20 bp, synthetic construct
  misc_feature 1..20: note = chemically synthesized
  source 1..20: mol_type = other DNA
tgcattctcctactggattt

SEQ ID NO: 54871 - DNA, 20 bp, synthetic construct
  misc_feature 1..20: note = chemically synthesized
  source 1..20: mol_type = other DNA
tcctactggatttgggctct

SEQ ID NO: 54872 - DNA, 20 bp, synthetic construct
  misc_feature 1..20: note = chemically synthesized
  source 1..20: mol_type = other DNA
ctactggatttgggctctca

SEQ ID NO: 54873 - DNA, 20 bp, synthetic construct
  misc_feature 1..20: note = chemically synthesized
  source 1..20: mol_type = other DNA
tactggatttgggctctcag

SEQ ID NO: 54874 - DNA, 20 bp, synthetic construct
  misc_feature 1..20: note = chemically synthesized
  source 1..20: mol_type = other DNA
actggatttgggctctcaga

SEQ ID NO: 54875 - DNA, 20 bp, synthetic construct
  misc_feature 1..20: note = chemically synthesized
  source 1..20: mol_type = other DNA
tgggctctcagagggcgttg

SEQ ID NO: 54876 - DNA, 20 bp, synthetic construct
  misc_feature 1..20: note = chemically synthesized
  source 1..20: mol_type = other DNA
gggctctcagagggcgttgt

SEQ ID NO: 54877 - DNA, 20 bp, synthetic construct
  misc_feature 1..20: note = chemically synthesized
  source 1..20: mol_type = other DNA
tcagagggcgttgtgggaac

SEQ ID NO: 54878 - DNA, 20 bp, synthetic construct
  misc_feature 1..20: note = chemically synthesized
  source 1..20: mol_type = other DNA
cagagggcgttgtgggaacc

SEQ ID NO: 54879 - DNA, 20 bp, synthetic construct
  misc_feature 1..20: note = chemically synthesized
  source 1..20: mol_type = other DNA
tgtgggaaccaggcccctca

SEQ ID NO: 54880 - DNA, 20 bp, synthetic construct
  misc_feature 1..20: note = chemically synthesized
  source 1..20: mol_type = other DNA
aggcccctcacagaatcaaa

SEQ ID NO: 54881 - DNA, 20 bp, synthetic construct
  misc_feature 1..20: note = chemically synthesized
  source 1..20: mol_type = other DNA
cagaatcaaatggtcccaac

SEQ ID NO: 54882 - DNA, 20 bp, synthetic construct
  misc_feature 1..20: note = chemically synthesized
  source 1..20: mol_type = other DNA
agaatcaaatggtcccaacc

SEQ ID NO: 54883 - DNA, 20 bp, synthetic construct
  misc_feature 1..20: note = chemically synthesized
  source 1..20: mol_type = other DNA
gaatcaaatggtcccaacca

SEQ ID NO: 54884 - DNA, 20 bp, synthetic construct
  misc_feature 1..20: note = chemically synthesized
  source 1..20: mol_type = other DNA
atcaaatggtcccaaccagg

SEQ ID NO: 54885 - DNA, 20 bp, synthetic construct
  misc_feature 1..20: note = chemically synthesized
  source 1..20: mol_type = other DNA
aatggtcccaaccagggaga

SEQ ID NO: 54886 - DNA, 20 bp, synthetic construct
  misc_feature 1..20: note = chemically synthesized
  source 1..20: mol_type = other DNA
ccaaccagggagaaagaaaa

SEQ ID NO: 54887 - DNA, 20 bp, synthetic construct
  misc_feature 1..20: note = chemically synthesized
  source 1..20: mol_type = other DNA
agtcttttttttttttttaa

SEQ ID NO: 54888 - DNA, 20 bp, synthetic construct
  misc_feature 1..20: note = chemically synthesized
  source 1..20: mol_type = other DNA
tcttttttttttttttaata

SEQ ID NO: 54889 - DNA, 20 bp, synthetic construct
  misc_feature 1..20: note = chemically synthesized
  source 1..20: mol_type = other DNA
ttttttttttttaatagaga

SEQ ID NO: 54890 - DNA, 20 bp, synthetic construct
  misc_feature 1..20: note = chemically synthesized
  source 1..20: mol_type = other DNA
tttttttttttaatagagat

SEQ ID NO: 54891 - DNA, 20 bp, synthetic construct
  misc_feature 1..20: note = chemically synthesized
  source 1..20: mol_type = other DNA
ttttttttttaatagagatg

SEQ ID NO: 54892 - DNA, 20 bp, synthetic construct
  misc_feature 1..20: note = chemically synthesized
  source 1..20: mol_type = other DNA
tttttttttaatagagatgg

SEQ ID NO: 54893 - DNA, 20 bp, synthetic construct
  misc_feature 1..20: note = chemically synthesized
  source 1..20: mol_type = other DNA
gggggtctcactatgctgcc

SEQ ID NO: 54894 - DNA, 20 bp, synthetic construct
  misc_feature 1..20: note = chemically synthesized
  source 1..20: mol_type = other DNA
ggggtctcactatgctgccc

SEQ ID NO: 54895 - DNA, 20 bp, synthetic construct
  misc_feature 1..20: note = chemically synthesized
  source 1..20: mol_type = other DNA
tctcactatgctgcccaggc

SEQ ID NO: 54896 - DNA, 20 bp, synthetic construct
  misc_feature 1..20: note = chemically synthesized
  source 1..20: mol_type = other DNA
ccaggctggtcttgaactcc

SEQ ID NO: 54897 - DNA, 20 bp, synthetic construct
  misc_feature 1..20: note = chemically synthesized
  source 1..20: mol_type = other DNA
caggctggtcttgaactcct

SEQ ID NO: 54898 - DNA, 20 bp, synthetic construct
  misc_feature 1..20: note = chemically synthesized
  source 1..20: mol_type = other DNA
ggtcttgaactcctgggttc

SEQ ID NO: 54899 - DNA, 20 bp, synthetic construct
  misc_feature 1..20: note = chemically synthesized
  source 1..20: mol_type = other DNA
ttcaagtgatcctcctgcct

SEQ ID NO: 54900 - DNA, 20 bp, synthetic construct
  misc_feature 1..20: note = chemically synthesized
  source 1..20: mol_type = other DNA
cctcctgcctcagcctccca

SEQ ID NO: 54901 - DNA, 20 bp, synthetic construct
  misc_feature 1..20: note = chemically synthesized
  source 1..20: mol_type = other DNA
gcctcagcctcccaaagtgc

SEQ ID NO: 54902 - DNA, 20 bp, synthetic construct
  misc_feature 1..20: note = chemically synthesized
  source 1..20: mol_type = other DNA
cctcagcctcccaaagtgct

SEQ ID NO: 54903 - DNA, 20 bp, synthetic construct
  misc_feature 1..20: note = chemically synthesized
  source 1..20: mol_type = other DNA
ctcccaaagtgctgggatta

SEQ ID NO: 54904 - DNA, 20 bp, synthetic construct
  misc_feature 1..20: note = chemically synthesized
  source 1..20: mol_type = other DNA
aagtgctgggattacagtgt

SEQ ID NO: 54905 - DNA, 20 bp, synthetic construct
  misc_feature 1..20: note = chemically synthesized
  source 1..20: mol_type = other DNA
acagtgtgagccactgcgct

SEQ ID NO: 54906 - DNA, 20 bp, synthetic construct
  misc_feature 1..20: note = chemically synthesized
  source 1..20: mol_type = other DNA
tgtgagccactgcgcttggc

SEQ ID NO: 54907 - DNA, 20 bp, synthetic construct
  misc_feature 1..20: note = chemically synthesized
  source 1..20: mol_type = other DNA
ccactgcgcttggccagaaa

SEQ ID NO: 54908 - DNA, 20 bp, synthetic construct
  misc_feature 1..20: note = chemically synthesized
  source 1..20: mol_type = other DNA
ctgaactgaaccctactgct

SEQ ID NO: 54909 - DNA, 20 bp, synthetic construct
  misc_feature 1..20: note = chemically synthesized
  source 1..20: mol_type = other DNA
tgaactgaaccctactgctt

SEQ ID NO: 54910 - DNA, 20 bp, synthetic construct
  misc_feature 1..20: note = chemically synthesized
  source 1..20: mol_type = other DNA
tgaaccctactgcttaggca

SEQ ID NO: 54911 - DNA, 20 bp, synthetic construct
  misc_feature 1..20: note = chemically synthesized
  source 1..20: mol_type = other DNA
ttgataatctatttgctccc

SEQ ID NO: 54912 - DNA, 20 bp, synthetic construct
  misc_feature 1..20: note = chemically synthesized
  source 1..20: mol_type = other DNA
tgataatctatttgctccca

SEQ ID NO: 54913 - DNA, 20 bp, synthetic construct
  misc_feature 1..20: note = chemically synthesized
  source 1..20: mol_type = other DNA
tctatttgctcccaaggacc

SEQ ID NO: 54914 - DNA, 20 bp, synthetic construct
  misc_feature 1..20: note = chemically synthesized
  source 1..20: mol_type = other DNA
tgctcccaaggaccaagtcc

SEQ ID NO: 54915 - DNA, 20 bp, synthetic construct
  misc_feature 1..20: note = chemically synthesized
  source 1..20: mol_type = other DNA
accaagtccaagatccttac

SEQ ID NO: 54916 - DNA, 20 bp, synthetic construct
  misc_feature 1..20: note = chemically synthesized
  source 1..20: mol_type = other DNA
agtccaagatccttacaaga

SEQ ID NO: 54917 - DNA, 20 bp, synthetic construct
  misc_feature 1..20: note = chemically synthesized
  source 1..20: mol_type = other DNA
gtccaagatccttacaagaa

SEQ ID NO: 54918 - DNA, 20 bp, synthetic construct
  misc_feature 1..20: note = chemically synthesized
  source 1..20: mol_type = other DNA
tccttacaagaaaggtctgc

SEQ ID NO: 54919 - DNA, 20 bp, synthetic construct
  misc_feature 1..20: note = chemically synthesized
  source 1..20: mol_type = other DNA
tacaagaaaggtctgccaga

SEQ ID NO: 54920 - DNA, 20 bp, synthetic construct
  misc_feature 1..20: note = chemically synthesized
  source 1..20: mol_type = other DNA
aatactgcccccactccctg

SEQ ID NO: 54921 - DNA, 20 bp, synthetic construct
  misc_feature 1..20: note = chemically synthesized
  source 1..20: mol_type = other DNA
ccccactccctgaagtttat

SEQ ID NO: 54922 - DNA, 20 bp, synthetic construct
  misc_feature 1..20: note = chemically synthesized
  source 1..20: mol_type = other DNA
cccactccctgaagtttatg

SEQ ID NO: 54923 - DNA, 20 bp, synthetic construct
  misc_feature 1..20: note = chemically synthesized
  source 1..20: mol_type = other DNA
ctgaagtttatgaggttgat

SEQ ID NO: 54924 - DNA, 20 bp, synthetic construct
  misc_feature 1..20: note = chemically synthesized
  source 1..20: mol_type = other DNA
aggttgataagaaaacataa

SEQ ID NO: 54925 - DNA, 20 bp, synthetic construct
  misc_feature 1..20: note = chemically synthesized
  source 1..20: mol_type = other DNA
ataagaaaacataacagata

SEQ ID NO: 54926 - DNA, 20 bp, synthetic construct
  misc_feature 1..20: note = chemically synthesized
  source 1..20: mol_type = other DNA
cataacagataaagtttatt

SEQ ID NO: 54927 - DNA, 20 bp, synthetic construct
  misc_feature 1..20: note = chemically synthesized
  source 1..20: mol_type = other DNA
attgagtgctaactttatgc

SEQ ID NO: 54928 - DNA, 20 bp, synthetic construct
  misc_feature 1..20: note = chemically synthesized
  source 1..20: mol_type = other DNA
atttatacaattaactcgct

SEQ ID NO: 54929 - DNA, 20 bp, synthetic construct
  misc_feature 1..20: note = chemically synthesized
  source 1..20: mol_type = other DNA
agttctcccaacatctctgt

SEQ ID NO: 54930 - DNA, 20 bp, synthetic construct
  misc_feature 1..20: note = chemically synthesized
  source 1..20: mol_type = other DNA
ctcccaacatctctgtgagt

SEQ ID NO: 54931 - DNA, 20 bp, synthetic construct
  misc_feature 1..20: note = chemically synthesized
  source 1..20: mol_type = other DNA
atttatccttatattacaaa

SEQ ID NO: 54932 - DNA, 20 bp, synthetic construct
  misc_feature 1..20: note = chemically synthesized
  source 1..20: mol_type = other DNA
tttatccttatattacaaat

SEQ ID NO: 54933 - DNA, 20 bp, synthetic construct
  misc_feature 1..20: note = chemically synthesized
  source 1..20: mol_type = other DNA
ccttatattacaaataggtc

SEQ ID NO: 54934 - DNA, 20 bp, synthetic construct
  misc_feature 1..20: note = chemically synthesized
  source 1..20: mol_type = other DNA
ttatattacaaataggtcca

SEQ ID NO: 54935 - DNA, 20 bp, synthetic construct
  misc_feature 1..20: note = chemically synthesized
  source 1..20: mol_type = other DNA
tatattacaaataggtccag

SEQ ID NO: 54936 - DNA, 20 bp, synthetic construct
  misc_feature 1..20: note = chemically synthesized
  source 1..20: mol_type = other DNA
atattacaaataggtccaga

SEQ ID NO: 54937 - DNA, 20 bp, synthetic construct
  misc_feature 1..20: note = chemically synthesized
  source 1..20: mol_type = other DNA
tattacaaataggtccagag

SEQ ID NO: 54938 - DNA, 20 bp, synthetic construct
  misc_feature 1..20: note = chemically synthesized
  source 1..20: mol_type = other DNA
acaaataggtccagaggggt

SEQ ID NO: 54939 - DNA, 20 bp, synthetic construct
  misc_feature 1..20: note = chemically synthesized
  source 1..20: mol_type = other DNA
gaggggttagtcatcttgtc

SEQ ID NO: 54940 - DNA, 20 bp, synthetic construct
  misc_feature 1..20: note = chemically synthesized
  source 1..20: mol_type = other DNA
gttagtcatcttgtccagaa

SEQ ID NO: 54941 - DNA, 20 bp, synthetic construct
  misc_feature 1..20: note = chemically synthesized
  source 1..20: mol_type = other DNA
agtcatcttgtccagaatgg

SEQ ID NO: 54942 - DNA, 20 bp, synthetic construct
  misc_feature 1..20: note = chemically synthesized
  source 1..20: mol_type = other DNA
cttgtccagaatggtggaac

SEQ ID NO: 54943 - DNA, 20 bp, synthetic construct
  misc_feature 1..20: note = chemically synthesized
  source 1..20: mol_type = other DNA
ttgtccagaatggtggaacc

SEQ ID NO: 54944 - DNA, 20 bp, synthetic construct
  misc_feature 1..20: note = chemically synthesized
  source 1..20: mol_type = other DNA
cagaatggtggaaccaggtt

SEQ ID NO: 54945 - DNA, 20 bp, synthetic construct
  misc_feature 1..20: note = chemically synthesized
  source 1..20: mol_type = other DNA
agaatggtggaaccaggtta

SEQ ID NO: 54946 - DNA, 20 bp, synthetic construct
  misc_feature 1..20: note = chemically synthesized
  source 1..20: mol_type = other DNA
ggtggaaccaggttaaggat

SEQ ID NO: 54947 - DNA, 20 bp, synthetic construct
  misc_feature 1..20: note = chemically synthesized
  source 1..20: mol_type = other DNA
gtggaaccaggttaaggatc

SEQ ID NO: 54948 - DNA, 20 bp, synthetic construct
  misc_feature 1..20: note = chemically synthesized
  source 1..20: mol_type = other DNA
gaaccaggttaaggatcagg

SEQ ID NO: 54949 - DNA, 20 bp, synthetic construct
  misc_feature 1..20: note = chemically synthesized
  source 1..20: mol_type = other DNA
aggttaaggatcaggcagtc

SEQ ID NO: 54950 - DNA, 20 bp, synthetic construct
  misc_feature 1..20: note = chemically synthesized
  source 1..20: mol_type = other DNA
ggttaaggatcaggcagtct

SEQ ID NO: 54951 - DNA, 20 bp, synthetic construct
  misc_feature 1..20: note = chemically synthesized
  source 1..20: mol_type = other DNA
aaggatcaggcagtctgggc

SEQ ID NO: 54952 - DNA, 20 bp, synthetic construct
  misc_feature 1..20: note = chemically synthesized
  source 1..20: mol_type = other DNA
aggatcaggcagtctgggct

SEQ ID NO: 54953 - DNA, 20 bp, synthetic construct
  misc_feature 1..20: note = chemically synthesized
  source 1..20: mol_type = other DNA
caggcagtctgggctgggca

SEQ ID NO: 54954 - DNA, 20 bp, synthetic construct
  misc_feature 1..20: note = chemically synthesized
  source 1..20: mol_type = other DNA
gcagtctgggctgggcatgg

SEQ ID NO: 54955 - DNA, 20 bp, synthetic construct
  misc_feature 1..20: note = chemically synthesized
  source 1..20: mol_type = other DNA
gtggctcacatctgtaatcc

SEQ ID NO: 54956 - DNA, 20 bp, synthetic construct
  misc_feature 1..20: note = chemically synthesized
  source 1..20: mol_type = other DNA
catctgtaatcccagcactt

SEQ ID NO: 54957 - DNA, 20 bp, synthetic construct
  misc_feature 1..20: note = chemically synthesized
  source 1..20: mol_type = other DNA
atctgtaatcccagcacttt

SEQ ID NO: 54958 - DNA, 20 bp, synthetic construct
  misc_feature 1..20: note = chemically synthesized
  source 1..20: mol_type = other DNA
ctgtaatcccagcactttgg

SEQ ID NO: 54959 - DNA, 20 bp, synthetic construct
  misc_feature 1..20: note = chemically synthesized
  source 1..20: mol_type = other DNA
tgtaatcccagcactttggg

SEQ ID NO: 54960 - DNA, 20 bp, synthetic construct
  misc_feature 1..20: note = chemically synthesized
  source 1..20: mol_type = other DNA
tcccagcactttgggaggct

SEQ ID NO: 54961 - DNA, 20 bp, synthetic construct
  misc_feature 1..20: note = chemically synthesized
  source 1..20: mol_type = other DNA
cccagcactttgggaggctg

SEQ ID NO: 54962 - DNA, 20 bp, synthetic construct
  misc_feature 1..20: note = chemically synthesized
  source 1..20: mol_type = other DNA
agcactttgggaggctgagg

SEQ ID NO: 54963 - DNA, 20 bp, synthetic construct
  misc_feature 1..20: note = chemically synthesized
  source 1..20: mol_type = other DNA
actttgggaggctgaggtgg

SEQ ID NO: 54964 - DNA, 20 bp, synthetic construct
  misc_feature 1..20: note = chemically synthesized
  source 1..20: mol_type = other DNA
gctgaggtggcagattgcct

SEQ ID NO: 54965 - DNA, 20 bp, synthetic construct
  misc_feature 1..20: note = chemically synthesized
  source 1..20: mol_type = other DNA
ggtggcagattgcctgagct

SEQ ID NO: 54966 - DNA, 20 bp, synthetic construct
  misc_feature 1..20: note = chemically synthesized
  source 1..20: mol_type = other DNA
gtggcagattgcctgagctc

SEQ ID NO: 54967 - DNA, 20 bp, synthetic construct
  misc_feature 1..20: note = chemically synthesized
  source 1..20: mol_type = other DNA
ggcagattgcctgagctcag

SEQ ID NO: 54968 - DNA, 20 bp, synthetic construct
  misc_feature 1..20: note = chemically synthesized
  source 1..20: mol_type = other DNA
ttgcctgagctcaggagttc

SEQ ID NO: 54969 - DNA, 20 bp, synthetic construct
  misc_feature 1..20: note = chemically synthesized
  source 1..20: mol_type = other DNA
tgagctcaggagttcgagac

SEQ ID NO: 54970 - DNA, 20 bp, synthetic construct
  misc_feature 1..20: note = chemically synthesized
  source 1..20: mol_type = other DNA
tcaggagttcgagaccagcc

SEQ ID NO: 54971 - DNA, 20 bp, synthetic construct
  misc_feature 1..20: note = chemically synthesized
  source 1..20: mol_type = other DNA
caggagttcgagaccagcct

SEQ ID NO: 54972 - DNA, 20 bp, synthetic construct
  misc_feature 1..20: note = chemically synthesized
  source 1..20: mol_type = other DNA
cgagaccagcctgggcaaca

SEQ ID NO: 54973 - DNA, 20 bp, synthetic construct
  misc_feature 1..20: note = chemically synthesized
  source 1..20: mol_type = other DNA
accagcctgggcaacatggt

SEQ ID NO: 54974 - DNA, 20 bp, synthetic construct
  misc_feature 1..20: note = chemically synthesized
  source 1..20: mol_type = other DNA
ataccaaaaatacaaaacat

SEQ ID NO: 54975 - DNA, 20 bp, synthetic construct
  misc_feature 1..20: note = chemically synthesized
  source 1..20: mol_type = other DNA
aaaaatacaaaacattagcc

SEQ ID NO: 54976 - DNA, 20 bp, synthetic construct
  misc_feature 1..20: note = chemically synthesized
  source 1..20: mol_type = other DNA
tacaaaacattagccaagcg

SEQ ID NO: 54977 - DNA, 20 bp, synthetic construct
  misc_feature 1..20: note = chemically synthesized
  source 1..20: mol_type = other DNA
aaaacattagccaagcgtgg

SEQ ID NO: 54978 - DNA, 20 bp, synthetic construct
  misc_feature 1..20: note = chemically synthesized
  source 1..20: mol_type = other DNA
agcgtggtggtgcatgcctg

SEQ ID NO: 54979 - DNA, 20 bp, synthetic construct
  misc_feature 1..20: note = chemically synthesized
  source 1..20: mol_type = other DNA
tgcctgtggtcctaactact

SEQ ID NO: 54980 - DNA, 20 bp, synthetic construct
  misc_feature 1..20: note = chemically synthesized
  source 1..20: mol_type = other DNA
gcctgtggtcctaactactc

SEQ ID NO: 54981 - DNA, 20 bp, synthetic construct
  misc_feature 1..20: note = chemically synthesized
  source 1..20: mol_type = other DNA
tgtggtcctaactactcagg

SEQ ID NO: 54982 - DNA, 20 bp, synthetic construct
  misc_feature 1..20: note = chemically synthesized
  source 1..20: mol_type = other DNA
tcctaactactcaggtggct

SEQ ID NO: 54983 - DNA, 20 bp, synthetic construct
  misc_feature 1..20: note = chemically synthesized
  source 1..20: mol_type = other DNA
cctaactactcaggtggctg

SEQ ID NO: 54984 - DNA, 20 bp, synthetic construct
  misc_feature 1..20: note = chemically synthesized
  source 1..20: mol_type = other DNA
aactactcaggtggctgagg

SEQ ID NO: 54985 - DNA, 20 bp, synthetic construct
  misc_feature 1..20: note = chemically synthesized
  source 1..20: mol_type = other DNA
actactcaggtggctgaggt

SEQ ID NO: 54986 - DNA, 20 bp, synthetic construct
  misc_feature 1..20: note = chemically synthesized
  source 1..20: mol_type = other DNA
tactcaggtggctgaggtgg

SEQ ID NO: 54987 - DNA, 20 bp, synthetic construct
  misc_feature 1..20: note = chemically synthesized
  source 1..20: mol_type = other DNA
ctgaggtgggagaatccctt

SEQ ID NO: 54988 - DNA, 20 bp, synthetic construct
  misc_feature 1..20: note = chemically synthesized
  source 1..20: mol_type = other DNA
gtgggagaatcccttgagct

SEQ ID NO: 54989 - DNA, 20 bp, synthetic construct
  misc_feature 1..20: note = chemically synthesized
  source 1..20: mol_type = other DNA
gggagaatcccttgagctca

SEQ ID NO: 54990 - DNA, 20 bp, synthetic construct
  misc_feature 1..20: note = chemically synthesized
  source 1..20: mol_type = other DNA
ggagaatcccttgagctcag

SEQ ID NO: 54991 - DNA, 20 bp, synthetic construct
  misc_feature 1..20: note = chemically synthesized
  source 1..20: mol_type = other DNA
tcccttgagctcagaggttg

SEQ ID NO: 54992 - DNA, 20 bp, synthetic construct
  misc_feature 1..20: note = chemically synthesized
  source 1..20: mol_type = other DNA
ttgagctcagaggttgcagt

SEQ ID NO: 54993 - DNA, 20 bp, synthetic construct
  misc_feature 1..20: note = chemically synthesized
  source 1..20: mol_type = other DNA
ctcagaggttgcagtgagcc

SEQ ID NO: 54994 - DNA, 20 bp, synthetic construct
  misc_feature 1..20: note = chemically synthesized
  source 1..20: mol_type = other DNA
aagattatgccactgcactc

SEQ ID NO: 54995 - DNA, 20 bp, synthetic construct
  misc_feature 1..20: note = chemically synthesized
  source 1..20: mol_type = other DNA
tatgccactgcactccagcc

SEQ ID NO: 54996 - DNA, 20 bp, synthetic construct
  misc_feature 1..20: note = chemically synthesized
  source 1..20: mol_type = other DNA
atgccactgcactccagcct

SEQ ID NO: 54997 - DNA, 20 bp, synthetic construct
  misc_feature 1..20: note = chemically synthesized
  source 1..20: mol_type = other DNA
ctgcactccagcctgggtga

SEQ ID NO: 54998 - DNA, 20 bp, synthetic construct
  misc_feature 1..20: note = chemically synthesized
  source 1..20: mol_type = other DNA
gcactccagcctgggtgaca

SEQ ID NO: 54999 - DNA, 20 bp, synthetic construct
  misc_feature 1..20: note = chemically synthesized
  source 1..20: mol_type = other DNA
tccagcctgggtgacagagt

SEQ ID NO: 55000 - DNA, 20 bp, synthetic construct
  misc_feature 1..20: note = chemically synthesized
  source 1..20: mol_type = other DNA
gacagagtgagaccctgtct

SEQ ID NO: 55001 - DNA, 20 bp, synthetic construct
  misc_feature 1..20: note = chemically synthesized
  source 1..20: mol_type = other DNA
tctcagaaaaaaaaaaaaaa

SEQ ID NO: 55002 - DNA, 20 bp, synthetic construct
  misc_feature 1..20: note = chemically synthesized
  source 1..20: mol_type = other DNA
cagaaaaaaaaaaaaaaaag

SEQ ID NO: 55003 - DNA, 20 bp, synthetic construct
  misc_feature 1..20: note = chemically synthesized
  source 1..20: mol_type = other DNA
aaaaaaaaaaaaaaagaagc

SEQ ID NO: 55004 - DNA, 20 bp, synthetic construct
  misc_feature 1..20: note = chemically synthesized
  source 1..20: mol_type = other DNA
aaaaaaaaaaaagaagcaag

SEQ ID NO: 55005 - DNA, 20 bp, synthetic construct
  misc_feature 1..20: note = chemically synthesized
  source 1..20: mol_type = other DNA
aaaaaaagaagcaagcagtc

SEQ ID NO: 55006 - DNA, 20 bp, synthetic construct
  misc_feature 1..20: note = chemically synthesized
  source 1..20: mol_type = other DNA
aaaaaagaagcaagcagtct

SEQ ID NO: 55007 - DNA, 20 bp, synthetic construct
  misc_feature 1..20: note = chemically synthesized
  source 1..20: mol_type = other DNA
aagaagcaagcagtctgggc

SEQ ID NO: 55008 - DNA, 20 bp, synthetic construct
  misc_feature 1..20: note = chemically synthesized
  source 1..20: mol_type = other DNA
agaagcaagcagtctgggct

SEQ ID NO: 55009 - DNA, 20 bp, synthetic construct
  misc_feature 1..20: note = chemically synthesized
  source 1..20: mol_type = other DNA
gcagtctgggctgggtgctg

SEQ ID NO: 55010 - DNA, 20 bp, synthetic construct
  misc_feature 1..20: note = chemically synthesized
  source 1..20: mol_type = other DNA
gtggctcgcgcctgtaatcc

SEQ ID NO: 55011 - DNA, 20 bp, synthetic construct
  misc_feature 1..20: note = chemically synthesized
  source 1..20: mol_type = other DNA
ttgtaatatatcctgcttat

SEQ ID NO: 55012 - DNA, 20 bp, synthetic construct
  misc_feature 1..20: note = chemically synthesized
  source 1..20: mol_type = other DNA
aatatatcctgcttattaga

SEQ ID NO: 55013 - DNA, 20 bp, synthetic construct
  misc_feature 1..20: note = chemically synthesized
  source 1..20: mol_type = other DNA
tgatcactcatctgttccct

SEQ ID NO: 55014 - DNA, 20 bp, synthetic construct
  misc_feature 1..20: note = chemically synthesized
  source 1..20: mol_type = other DNA
ctcatctgttccctaagtta

SEQ ID NO: 55015 - DNA, 20 bp, synthetic construct
  misc_feature 1..20: note = chemically synthesized
  source 1..20: mol_type = other DNA
ttatagatttacgtccactt

SEQ ID NO: 55016 - DNA, 20 bp, synthetic construct
  misc_feature 1..20: note = chemically synthesized
  source 1..20: mol_type = other DNA
atttacgtccactttagaaa

SEQ ID NO: 55017 - DNA, 20 bp, synthetic construct
  misc_feature 1..20: note = chemically synthesized
  source 1..20: mol_type = other DNA
ccactttagaaatggcttgt

SEQ ID NO: 55018 - DNA, 20 bp, synthetic construct
  misc_feature 1..20: note = chemically synthesized
  source 1..20: mol_type = other DNA
cactttagaaatggcttgtg

SEQ ID NO: 55019 - DNA, 20 bp, synthetic construct
  misc_feature 1..20: note = chemically synthesized
  source 1..20: mol_type = other DNA
ttagaaatggcttgtgaggc

SEQ ID NO: 55020 - DNA, 20 bp, synthetic construct
  misc_feature 1..20: note = chemically synthesized
  source 1..20: mol_type = other DNA
atggcttgtgaggcaagttt

SEQ ID NO: 55021 - DNA, 20 bp, synthetic construct
  misc_feature 1..20: note = chemically synthesized
  source 1..20: mol_type = other DNA
caagtttaagtgaccgatga

SEQ ID NO: 55022 - DNA, 20 bp, synthetic construct
  misc_feature 1..20: note = chemically synthesized
  source 1..20: mol_type = other DNA
agtgaccgatgacagtttta

SEQ ID NO: 55023 - DNA, 20 bp, synthetic construct
  misc_feature 1..20: note = chemically synthesized
  source 1..20: mol_type = other DNA
accgatgacagttttaaagc

SEQ ID NO: 55024 - DNA, 20 bp, synthetic construct
  misc_feature 1..20: note = chemically synthesized
  source 1..20: mol_type = other DNA
ccgatgacagttttaaagca

SEQ ID NO: 55025 - DNA, 20 bp, synthetic construct
  misc_feature 1..20: note = chemically synthesized
  source 1..20: mol_type = other DNA
gcaaggtccatgtcatgtta

SEQ ID NO: 55026 - DNA, 20 bp, synthetic construct
  misc_feature 1..20: note = chemically synthesized
  source 1..20: mol_type = other DNA
tgtcatgttatggcataatt

SEQ ID NO: 55027 - DNA, 20 bp, synthetic construct
  misc_feature 1..20: note = chemically synthesized
  source 1..20: mol_type = other DNA
catgttatggcataatttgg

SEQ ID NO: 55028 - DNA, 20 bp, synthetic construct
  misc_feature 1..20: note = chemically synthesized
  source 1..20: mol_type = other DNA
cataatttggtagaatgttc

SEQ ID NO: 55029 - DNA, 20 bp, synthetic construct
  misc_feature 1..20: note = chemically synthesized
  source 1..20: mol_type = other DNA
aatttggtagaatgttctag

SEQ ID NO: 55030 - DNA, 20 bp, synthetic construct
  misc_feature 1..20: note = chemically synthesized
  source 1..20: mol_type = other DNA
agaatgttctagtagtgtat

SEQ ID NO: 55031 - DNA, 20 bp, synthetic construct
  misc_feature 1..20: note = chemically synthesized
  source 1..20: mol_type = other DNA
tctagtagtgtatcagtttt

SEQ ID NO: 55032 - DNA, 20 bp, synthetic construct
  misc_feature 1..20: note = chemically synthesized
  source 1..20: mol_type = other DNA
ctagtagtgtatcagttttc

SEQ ID NO: 55033 - DNA, 20 bp, synthetic construct
  misc_feature 1..20: note = chemically synthesized
  source 1..20: mol_type = other DNA
gtagtgtatcagttttcagg

SEQ ID NO: 55034 - DNA, 20 bp, synthetic construct
  misc_feature 1..20: note = chemically synthesized
  source 1..20: mol_type = other DNA
gtgtatcagttttcaggtgg

SEQ ID NO: 55035 - DNA, 20 bp, synthetic construct
  misc_feature 1..20: note = chemically synthesized
  source 1..20: mol_type = other DNA
tgtatcagttttcaggtggt

SEQ ID NO: 55036 - DNA, 20 bp, synthetic construct
  misc_feature 1..20: note = chemically synthesized
  source 1..20: mol_type = other DNA
agttttcaggtggtaggctt

SEQ ID NO: 55037 - DNA, 20 bp, synthetic construct
  misc_feature 1..20: note = chemically synthesized
  source 1..20: mol_type = other DNA
gttttcaggtggtaggcttg

SEQ ID NO: 55038 - DNA, 20 bp, synthetic construct
  misc_feature 1..20: note = chemically synthesized
  source 1..20: mol_type = other DNA
tgcaattctattattgccca

SEQ ID NO: 55039 - DNA, 20 bp, synthetic construct
  misc_feature 1..20: note = chemically synthesized
  source 1..20: mol_type = other DNA
ctattattgcccaaagaaaa

SEQ ID NO: 55040 - DNA, 20 bp, synthetic construct
  misc_feature 1..20: note = chemically synthesized
  source 1..20: mol_type = other DNA
ccaaagaaaatagacccatt

SEQ ID NO: 55041 - DNA, 20 bp, synthetic construct
  misc_feature 1..20: note = chemically synthesized
  source 1..20: mol_type = other DNA
caaagaaaatagacccatta

SEQ ID NO: 55042 - DNA, 20 bp, synthetic construct
  misc_feature 1..20: note = chemically synthesized
  source 1..20: mol_type = other DNA
agaaaatagacccattaagg

SEQ ID NO: 55043 - DNA, 20 bp, synthetic construct
  misc_feature 1..20: note = chemically synthesized
  source 1..20: mol_type = other DNA
gaagtccaacttctgctgcg

SEQ ID NO: 55044 - DNA, 20 bp, synthetic construct
  misc_feature 1..20: note = chemically synthesized
  source 1..20: mol_type = other DNA
ccaacttctgctgcgtggac

SEQ ID NO: 55045 - DNA, 20 bp, synthetic construct
  misc_feature 1..20: note = chemically synthesized
  source 1..20: mol_type = other DNA
cagtgctgccacatcacaca

SEQ ID NO: 55046 - DNA, 20 bp, synthetic construct
  misc_feature 1..20: note = chemically synthesized
  source 1..20: mol_type = other DNA
gccacatcacacatagacca

SEQ ID NO: 55047 - DNA, 20 bp, synthetic construct
  misc_feature 1..20: note = chemically synthesized
  source 1..20: mol_type = other DNA
ccacatcacacatagaccaa

SEQ ID NO: 55048 - DNA, 20 bp, synthetic construct
  misc_feature 1..20: note = chemically synthesized
  source 1..20: mol_type = other DNA
tcacacatagaccaaaggct

SEQ ID NO: 55049 - DNA, 20 bp, synthetic construct
  misc_feature 1..20: note = chemically synthesized
  source 1..20: mol_type = other DNA
cacacatagaccaaaggctt

SEQ ID NO: 55050 - DNA, 20 bp, synthetic construct
  misc_feature 1..20: note = chemically synthesized
  source 1..20: mol_type = other DNA
accaaaggcttaggtttttg

SEQ ID NO: 55051 - DNA, 20 bp, synthetic construct
  misc_feature 1..20: note = chemically synthesized
  source 1..20: mol_type = other DNA
ggcttaggtttttgtggttt

SEQ ID NO: 55052 - DNA, 20 bp, synthetic construct
  misc_feature 1..20: note = chemically synthesized
  source 1..20: mol_type = other DNA
tttattttattttattattt

SEQ ID NO: 55053 - DNA, 20 bp, synthetic construct
  misc_feature 1..20: note = chemically synthesized
  source 1..20: mol_type = other DNA
ttttattttattatttgaga

SEQ ID NO: 55054 - DNA, 20 bp, synthetic construct
  misc_feature 1..20: note = chemically synthesized
  source 1..20: mol_type = other DNA
ttattttattatttgagatg

SEQ ID NO: 55055 - DNA, 20 bp, synthetic construct
  misc_feature 1..20: note = chemically synthesized
  source 1..20: mol_type = other DNA
tggagtctcactctgtcacc

SEQ ID NO: 55056 - DNA, 20 bp, synthetic construct
  misc_feature 1..20: note = chemically synthesized
  source 1..20: mol_type = other DNA
ggagtctcactctgtcaccc

SEQ ID NO: 55057 - DNA, 20 bp, synthetic construct
  misc_feature 1..20: note = chemically synthesized
  source 1..20: mol_type = other DNA
tctcactctgtcacccaggc

SEQ ID NO: 55058 - DNA, 20 bp, synthetic construct
  misc_feature 1..20: note = chemically synthesized
  source 1..20: mol_type = other DNA
ctcactctgtcacccaggct

SEQ ID NO: 55059 - DNA, 20 bp, synthetic construct
  misc_feature 1..20: note = chemically synthesized
  source 1..20: mol_type = other DNA
tcactctgtcacccaggctg

SEQ ID NO: 55060 - DNA, 20 bp, synthetic construct
  misc_feature 1..20: note = chemically synthesized
  source 1..20: mol_type = other DNA
tcacccaggctggggtgcaa

SEQ ID NO: 55061 - DNA, 20 bp, synthetic construct
  misc_feature 1..20: note = chemically synthesized
  source 1..20: mol_type = other DNA
ggggtgcaatggcgcaatct

SEQ ID NO: 55062 - DNA, 20 bp, synthetic construct
  misc_feature 1..20: note = chemically synthesized
  source 1..20: mol_type = other DNA
tcactgcaacctccaactcc

SEQ ID NO: 55063 - DNA, 20 bp, synthetic construct
  misc_feature 1..20: note = chemically synthesized
  source 1..20: mol_type = other DNA
cactgcaacctccaactcct

SEQ ID NO: 55064 - DNA, 20 bp, synthetic construct
  misc_feature 1..20: note = chemically synthesized
  source 1..20: mol_type = other DNA
actgcaacctccaactcctg

SEQ ID NO: 55065 - DNA, 20 bp, synthetic construct
  misc_feature 1..20: note = chemically synthesized
  source 1..20: mol_type = other DNA
ctggggctcaaatgatcctc

SEQ ID NO: 55066 - DNA, 20 bp, synthetic construct
  misc_feature 1..20: note = chemically synthesized
  source 1..20: mol_type = other DNA
ctcaaatgatcctccagcct

SEQ ID NO: 55067 - DNA, 20 bp, synthetic construct
  misc_feature 1..20: note = chemically synthesized
  source 1..20: mol_type = other DNA
tccagcctcagcctcccgaa

SEQ ID NO: 55068 - DNA, 20 bp, synthetic construct
  misc_feature 1..20: note = chemically synthesized
  source 1..20: mol_type = other DNA
gcctcagcctcccgaatagc

SEQ ID NO: 55069 - DNA, 20 bp, synthetic construct
  misc_feature 1..20: note = chemically synthesized
  source 1..20: mol_type = other DNA
cctcagcctcccgaatagct

SEQ ID NO: 55070 - DNA, 20 bp, synthetic construct
  misc_feature 1..20: note = chemically synthesized
  source 1..20: mol_type = other DNA
ctcccgaatagctgggacta

SEQ ID NO: 55071 - DNA, 20 bp, synthetic construct
  misc_feature 1..20: note = chemically synthesized
  source 1..20: mol_type = other DNA
cagatgcgtaccaccatgcc

SEQ ID NO: 55072 - DNA, 20 bp, synthetic construct
  misc_feature 1..20: note = chemically synthesized
  source 1..20: mol_type = other DNA
gctaatttttttattttttg

SEQ ID NO: 55073 - DNA, 20 bp, synthetic construct
  misc_feature 1..20: note = chemically synthesized
  source 1..20: mol_type = other DNA
taatttttttattttttgta

SEQ ID NO: 55074 - DNA, 20 bp, synthetic construct
  misc_feature 1..20: note = chemically synthesized
  source 1..20: mol_type = other DNA
ttttttattttttgtagaga

SEQ ID NO: 55075 - DNA, 20 bp, synthetic construct
  misc_feature 1..20: note = chemically synthesized
  source 1..20: mol_type = other DNA
tttttattttttgtagagac

SEQ ID NO: 55076 - DNA, 20 bp, synthetic construct
  misc_feature 1..20: note = chemically synthesized
  source 1..20: mol_type = other DNA
ttttattttttgtagagaca

SEQ ID NO: 55077 - DNA, 20 bp, synthetic construct
  misc_feature 1..20: note = chemically synthesized
  source 1..20: mol_type = other DNA
ttttgtagagacagggtctc

SEQ ID NO: 55078 - DNA, 20 bp, synthetic construct
  misc_feature 1..20: note = chemically synthesized
  source 1..20: mol_type = other DNA
tctcaagcatcctcccgcct

SEQ ID NO: 55079 - DNA, 20 bp, synthetic construct
  misc_feature 1..20: note = chemically synthesized
  source 1..20: mol_type = other DNA
cctcccgccttagcctccca

SEQ ID NO: 55080 - DNA, 20 bp, synthetic construct
  misc_feature 1..20: note = chemically synthesized
  source 1..20: mol_type = other DNA
gccttagcctcccaaagtgc

SEQ ID NO: 55081 - DNA, 20 bp, synthetic construct
  misc_feature 1..20: note = chemically synthesized
  source 1..20: mol_type = other DNA
ccttagcctcccaaagtgct

SEQ ID NO: 55082 - DNA, 20 bp, synthetic construct
  misc_feature 1..20: note = chemically synthesized
  source 1..20: mol_type = other DNA
ctcccaaagtgctgggataa

SEQ ID NO: 55083 - DNA, 20 bp, synthetic construct
  misc_feature 1..20: note = chemically synthesized
  source 1..20: mol_type = other DNA
tcccaaagtgctgggataac

SEQ ID NO: 55084 - DNA, 20 bp, synthetic construct
  misc_feature 1..20: note = chemically synthesized
  source 1..20: mol_type = other DNA
agtgctgggataacaggcat

SEQ ID NO: 55085 - DNA, 20 bp, synthetic construct
  misc_feature 1..20: note = chemically synthesized
  source 1..20: mol_type = other DNA
caggcatgagctgctgcact

SEQ ID NO: 55086 - DNA, 20 bp, synthetic construct
  misc_feature 1..20: note = chemically synthesized
  source 1..20: mol_type = other DNA
ccttaaaaaaaatgtataac

SEQ ID NO: 55087 - DNA, 20 bp, synthetic construct
  misc_feature 1..20: note = chemically synthesized
  source 1..20: mol_type = other DNA
cttaaaaaaaatgtataaca

SEQ ID NO: 55088 - DNA, 20 bp, synthetic construct
  misc_feature 1..20: note = chemically synthesized
  source 1..20: mol_type = other DNA
aaaaaaatgtataacaaggc

SEQ ID NO: 55089 - DNA, 20 bp, synthetic construct
  misc_feature 1..20: note = chemically synthesized
  source 1..20: mol_type = other DNA
aaaaaatgtataacaaggcc

SEQ ID NO: 55090 - DNA, 20 bp, synthetic construct
  misc_feature 1..20: note = chemically synthesized
  source 1..20: mol_type = other DNA
atgtataacaaggccgggca

SEQ ID NO: 55091 - DNA, 20 bp, synthetic construct
  misc_feature 1..20: note = chemically synthesized
  source 1..20: mol_type = other DNA
tataacaaggccgggcacgg

SEQ ID NO: 55092 - DNA, 20 bp, synthetic construct
  misc_feature 1..20: note = chemically synthesized
  source 1..20: mol_type = other DNA
gtggctcatgcctgtaatcc

SEQ ID NO: 55093 - DNA, 20 bp, synthetic construct
  misc_feature 1..20: note = chemically synthesized
  source 1..20: mol_type = other DNA
tgcctgtaatcccagcactt

SEQ ID NO: 55094 - DNA, 20 bp, synthetic construct
  misc_feature 1..20: note = chemically synthesized
  source 1..20: mol_type = other DNA
gcctgtaatcccagcacttt

SEQ ID NO: 55095 - DNA, 20 bp, synthetic construct
  misc_feature 1..20: note = chemically synthesized
  source 1..20: mol_type = other DNA
tgtaatcccagcactttggg

SEQ ID NO: 55096 - DNA, 20 bp, synthetic construct
  misc_feature 1..20: note = chemically synthesized
  source 1..20: mol_type = other DNA
tcccagcactttgggaagcc

SEQ ID NO: 55097 - DNA, 20 bp, synthetic construct
  misc_feature 1..20: note = chemically synthesized
  source 1..20: mol_type = other DNA
cccagcactttgggaagcca

SEQ ID NO: 55098 - DNA, 20 bp, synthetic construct
  misc_feature 1..20: note = chemically synthesized
  source 1..20: mol_type = other DNA
agcactttgggaagccaagg

SEQ ID NO: 55099 - DNA, 20 bp, synthetic construct
  misc_feature 1..20: note = chemically synthesized
  source 1..20: mol_type = other DNA
gcactttgggaagccaaggc

SEQ ID NO: 55100 - DNA, 20 bp, synthetic construct
  misc_feature 1..20: note = chemically synthesized
  source 1..20: mol_type = other DNA
ctttgggaagccaaggcagg

SEQ ID NO: 55101 - DNA, 20 bp, synthetic construct
  misc_feature 1..20: note = chemically synthesized
  source 1..20: mol_type = other DNA
ccaaggcaggcagatcacct

SEQ ID NO: 55102 - DNA, 20 bp, synthetic construct
  misc_feature 1..20: note = chemically synthesized
  source 1..20: mol_type = other DNA
gcaggcagatcacctgagat

SEQ ID NO: 55103 - DNA, 20 bp, synthetic construct
  misc_feature 1..20: note = chemically synthesized
  source 1..20: mol_type = other DNA
caggcagatcacctgagatc

SEQ ID NO: 55104 - DNA, 20 bp, synthetic construct
  misc_feature 1..20: note = chemically synthesized
  source 1..20: mol_type = other DNA
ggcagatcacctgagatcag

SEQ ID NO: 55105 - DNA, 20 bp, synthetic construct
  misc_feature 1..20: note = chemically synthesized
  source 1..20: mol_type = other DNA
ggagttcgacctgaccaaca

SEQ ID NO: 55106 - DNA, 20 bp, synthetic construct
  misc_feature 1..20: note = chemically synthesized
  source 1..20: mol_type = other DNA
ctactaaaaatacaaaaaat

SEQ ID NO: 55107 - DNA, 20 bp, synthetic construct
  misc_feature 1..20: note = chemically synthesized
  source 1..20: mol_type = other DNA
taaaaatacaaaaaattagc

SEQ ID NO: 55108 - DNA, 20 bp, synthetic construct
  misc_feature 1..20: note = chemically synthesized
  source 1..20: mol_type = other DNA
tacaaaaaattagccagacg

SEQ ID NO: 55109 - DNA, 20 bp, synthetic construct
  misc_feature 1..20: note = chemically synthesized
  source 1..20: mol_type = other DNA
aaaaaattagccagacgtgg

SEQ ID NO: 55110 - DNA, 20 bp, synthetic construct
  misc_feature 1..20: note = chemically synthesized
  source 1..20: mol_type = other DNA
gtggcacatgcatgtaatcc

SEQ ID NO: 55111 - DNA, 20 bp, synthetic construct
  misc_feature 1..20: note = chemically synthesized
  source 1..20: mol_type = other DNA
gcatgtaatcccagctactt

SEQ ID NO: 55112 - DNA, 20 bp, synthetic construct
  misc_feature 1..20: note = chemically synthesized
  source 1..20: mol_type = other DNA
atgtaatcccagctacttga

SEQ ID NO: 55113 - DNA, 20 bp, synthetic construct
  misc_feature 1..20: note = chemically synthesized
  source 1..20: mol_type = other DNA
tgtaatcccagctacttgag

SEQ ID NO: 55114 - DNA, 20 bp, synthetic construct
  misc_feature 1..20: note = chemically synthesized
  source 1..20: mol_type = other DNA
tcccagctacttgagaggct

SEQ ID NO: 55115 - DNA, 20 bp, synthetic construct
  misc_feature 1..20: note = chemically synthesized
  source 1..20: mol_type = other DNA
agctacttgagaggctgaga

SEQ ID NO: 55116 - DNA, 20 bp, synthetic construct
  misc_feature 1..20: note = chemically synthesized
  source 1..20: mol_type = other DNA
gctacttgagaggctgagac

SEQ ID NO: 55117 - DNA, 20 bp, synthetic construct
  misc_feature 1..20: note = chemically synthesized
  source 1..20: mol_type = other DNA
tacttgagaggctgagacag

SEQ ID NO: 55118 - DNA, 20 bp, synthetic construct
  misc_feature 1..20: note = chemically synthesized
  source 1..20: mol_type = other DNA
gacaggagaactgcttgaac

SEQ ID NO: 55119 - DNA, 20 bp, synthetic construct
  misc_feature 1..20: note = chemically synthesized
  source 1..20: mol_type = other DNA
acaggagaactgcttgaacc

SEQ ID NO: 55120 - DNA, 20 bp, synthetic construct
  misc_feature 1..20: note = chemically synthesized
  source 1..20: mol_type = other DNA
caggagaactgcttgaaccg

SEQ ID NO: 55121 - DNA, 20 bp, synthetic construct
  misc_feature 1..20: note = chemically synthesized
  source 1..20: mol_type = other DNA
ggagaactgcttgaaccggg

SEQ ID NO: 55122 - DNA, 20 bp, synthetic construct
  misc_feature 1..20: note = chemically synthesized
  source 1..20: mol_type = other DNA
gagaactgcttgaaccgggg

SEQ ID NO: 55123 - DNA, 20 bp, synthetic construct
  misc_feature 1..20: note = chemically synthesized
  source 1..20: mol_type = other DNA
aactgcttgaaccggggagg

SEQ ID NO: 55124 - DNA, 20 bp, synthetic construct
  misc_feature 1..20: note = chemically synthesized
  source 1..20: mol_type = other DNA
ctgcttgaaccggggaggca

SEQ ID NO: 55125 - DNA, 20 bp, synthetic construct
  misc_feature 1..20: note = chemically synthesized
  source 1..20: mol_type = other DNA
tgcttgaaccggggaggcag

SEQ ID NO: 55126 - DNA, 20 bp, synthetic construct
  misc_feature 1..20: note = chemically synthesized
  source 1..20: mol_type = other DNA
aaccggggaggcagaggttg

SEQ ID NO: 55127 - DNA, 20 bp, synthetic construct
  misc_feature 1..20: note = chemically synthesized
  source 1..20: mol_type = other DNA
ggggaggcagaggttgcagt

SEQ ID NO: 55128 - DNA, 20 bp, synthetic construct
  misc_feature 1..20: note = chemically synthesized
  source 1..20: mol_type = other DNA
ggcagaggttgcagtgagcc

SEQ ID NO: 55129 - DNA, 20 bp, synthetic construct
  misc_feature 1..20: note = chemically synthesized
  source 1..20: mol_type = other DNA
cacaccattgcactccaacc

SEQ ID NO: 55130 - DNA, 20 bp, synthetic construct
  misc_feature 1..20: note = chemically synthesized
  source 1..20: mol_type = other DNA
acaccattgcactccaacct

SEQ ID NO: 55131 - DNA, 20 bp, synthetic construct
  misc_feature 1..20: note = chemically synthesized
  source 1..20: mol_type = other DNA
tgcactccaacctgggcaac

SEQ ID NO: 55132 - DNA, 20 bp, synthetic construct
  misc_feature 1..20: note = chemically synthesized
  source 1..20: mol_type = other DNA
cactccaacctgggcaacaa

SEQ ID NO: 55133 - DNA, 20 bp, synthetic construct
  misc_feature 1..20: note = chemically synthesized
  source 1..20: mol_type = other DNA
ctccatctcaaaaaaaaaaa

SEQ ID NO: 55134 - DNA, 20 bp, synthetic construct
  misc_feature 1..20: note = chemically synthesized
  source 1..20: mol_type = other DNA
aaaaaaaaaaagctgtataa

SEQ ID NO: 55135 - DNA, 20 bp, synthetic construct
  misc_feature 1..20: note = chemically synthesized
  source 1..20: mol_type = other DNA
aaaaagctgtataacagctt

SEQ ID NO: 55136 - DNA, 20 bp, synthetic construct
  misc_feature 1..20: note = chemically synthesized
  source 1..20: mol_type = other DNA
ccatacaattcactcattta

SEQ ID NO: 55137 - DNA, 20 bp, synthetic construct
  misc_feature 1..20: note = chemically synthesized
  source 1..20: mol_type = other DNA
ctcatttaaagtgtacaatt

SEQ ID NO: 55138 - DNA, 20 bp, synthetic construct
  misc_feature 1..20: note = chemically synthesized
  source 1..20: mol_type = other DNA
tcatttaaagtgtacaattc

SEQ ID NO: 55139 - DNA, 20 bp, synthetic construct
  misc_feature 1..20: note = chemically synthesized
  source 1..20: mol_type = other DNA
catttaaagtgtacaattca

SEQ ID NO: 55140 - DNA, 20 bp, synthetic construct
  misc_feature 1..20: note = chemically synthesized
  source 1..20: mol_type = other DNA
atttaaagtgtacaattcag

SEQ ID NO: 55141 - DNA, 20 bp, synthetic construct
  misc_feature 1..20: note = chemically synthesized
  source 1..20: mol_type = other DNA
cattccactccaacccactc

SEQ ID NO: 55142 - DNA, 20 bp, synthetic construct
  misc_feature 1..20: note = chemically synthesized
  source 1..20: mol_type = other DNA
cactccaacccactcaagcc

SEQ ID NO: 55143 - DNA, 20 bp, synthetic construct
  misc_feature 1..20: note = chemically synthesized
  source 1..20: mol_type = other DNA
actccaacccactcaagcct

SEQ ID NO: 55144 - DNA, 20 bp, synthetic construct
  misc_feature 1..20: note = chemically synthesized
  source 1..20: mol_type = other DNA
ctaatctactttctgtctca

SEQ ID NO: 55145 - DNA, 20 bp, synthetic construct
  misc_feature 1..20: note = chemically synthesized
  source 1..20: mol_type = other DNA
gtctcatagatttgcctatt

SEQ ID NO: 55146 - DNA, 20 bp, synthetic construct
  misc_feature 1..20: note = chemically synthesized
  source 1..20: mol_type = other DNA
tctcatagatttgcctattt

SEQ ID NO: 55147 - DNA, 20 bp, synthetic construct
  misc_feature 1..20: note = chemically synthesized
  source 1..20: mol_type = other DNA
ctcatagatttgcctatttg

SEQ ID NO: 55148 - DNA, 20 bp, synthetic construct
  misc_feature 1..20: note = chemically synthesized
  source 1..20: mol_type = other DNA
tttggggcatttcatataaa

SEQ ID NO: 55149 - DNA, 20 bp, synthetic construct
  misc_feature 1..20: note = chemically synthesized
  source 1..20: mol_type = other DNA
aaatagactcctacaatatg

SEQ ID NO: 55150 - DNA, 20 bp, synthetic construct
  misc_feature 1..20: note = chemically synthesized
  source 1..20: mol_type = other DNA
aatatgtggccttttgtgtc

SEQ ID NO: 55151 - DNA, 20 bp, synthetic construct
  misc_feature 1..20: note = chemically synthesized
  source 1..20: mol_type = other DNA
tgtgtctggcctctttcact

SEQ ID NO: 55152 - DNA, 20 bp, synthetic construct
  misc_feature 1..20: note = chemically synthesized
  source 1..20: mol_type = other DNA
tcacttagcatgatgttttc

SEQ ID NO: 55153 - DNA, 20 bp, synthetic construct
  misc_feature 1..20: note = chemically synthesized
  source 1..20: mol_type = other DNA
cacttagcatgatgttttca

SEQ ID NO: 55154 - DNA, 20 bp, synthetic construct
  misc_feature 1..20: note = chemically synthesized
  source 1..20: mol_type = other DNA
atctgtgttataacatatat

SEQ ID NO: 55155 - DNA, 20 bp, synthetic construct
  misc_feature 1..20: note = chemically synthesized
  source 1..20: mol_type = other DNA
tggtacttcatttcttttta

SEQ ID NO: 55156 - DNA, 20 bp, synthetic construct
  misc_feature 1..20: note = chemically synthesized
  source 1..20: mol_type = other DNA
cttcatttctttttatggac

SEQ ID NO: 55157 - DNA, 20 bp, synthetic construct
  misc_feature 1..20: note = chemically synthesized
  source 1..20: mol_type = other DNA
cattttatttatctgtttat

SEQ ID NO: 55158 - DNA, 20 bp, synthetic construct
  misc_feature 1..20: note = chemically synthesized
  source 1..20: mol_type = other DNA
attttatttatctgtttatc

SEQ ID NO: 55159 - DNA, 20 bp, synthetic construct
  misc_feature 1..20: note = chemically synthesized
  source 1..20: mol_type = other DNA
tatttatctgtttatcaggc

SEQ ID NO: 55160 - DNA, 20 bp, synthetic construct
  misc_feature 1..20: note = chemically synthesized
  source 1..20: mol_type = other DNA
atttatctgtttatcaggcc

SEQ ID NO: 55161 - DNA, 20 bp, synthetic construct
  misc_feature 1..20: note = chemically synthesized
  source 1..20: mol_type = other DNA
tctgtttatcaggccaggca

SEQ ID NO: 55162 - DNA, 20 bp, synthetic construct
  misc_feature 1..20: note = chemically synthesized
  source 1..20: mol_type = other DNA
gtttatcaggccaggcatgg

SEQ ID NO: 55163 - DNA, 20 bp, synthetic construct
  misc_feature 1..20: note = chemically synthesized
  source 1..20: mol_type = other DNA
gtggctcacatctgtaatcc

SEQ ID NO: 55164 - DNA, 20 bp, synthetic construct
  misc_feature 1..20: note = chemically synthesized
  source 1..20: mol_type = other DNA
catctgtaatcccagcactt

SEQ ID NO: 55165 - DNA, 20 bp, synthetic construct
  misc_feature 1..20: note = chemically synthesized
  source 1..20: mol_type = other DNA
atctgtaatcccagcacttt

SEQ ID NO: 55166 - DNA, 20 bp, synthetic construct
  misc_feature 1..20: note = chemically synthesized
  source 1..20: mol_type = other DNA
ctgtaatcccagcactttgg

SEQ ID NO: 55167 - DNA, 20 bp, synthetic construct
  misc_feature 1..20: note = chemically synthesized
  source 1..20: mol_type = other DNA
tgtaatcccagcactttggg

SEQ ID NO: 55168 - DNA, 20 bp, synthetic construct
  misc_feature 1..20: note = chemically synthesized
  source 1..20: mol_type = other DNA
tcccagcactttgggaggct

SEQ ID NO: 55169 - DNA, 20 bp, synthetic construct
  misc_feature 1..20: note = chemically synthesized
  source 1..20: mol_type = other DNA
cccagcactttgggaggctg

SEQ ID NO: 55170 - DNA, 20 bp, synthetic construct
  misc_feature 1..20: note = chemically synthesized
  source 1..20: mol_type = other DNA
agcactttgggaggctgagg

SEQ ID NO: 55171 - DNA, 20 bp, synthetic construct
  misc_feature 1..20: note = chemically synthesized
  source 1..20: mol_type = other DNA
gcactttgggaggctgaggc

SEQ ID NO: 55172 - DNA, 20 bp, synthetic construct
  misc_feature 1..20: note = chemically synthesized
  source 1..20: mol_type = other DNA
actttgggaggctgaggcag

SEQ ID NO: 55173 - DNA, 20 bp, synthetic construct
  misc_feature 1..20: note = chemically synthesized
  source 1..20: mol_type = other DNA
ctttgggaggctgaggcagg

SEQ ID NO: 55174 - DNA, 20 bp, synthetic construct
  misc_feature 1..20: note = chemically synthesized
  source 1..20: mol_type = other DNA
ctgaggcaggaggattactt

SEQ ID NO: 55175 - DNA, 20 bp, synthetic construct
  misc_feature 1..20: note = chemically synthesized
  source 1..20: mol_type = other DNA
ctcaagtaatcctcctgcct

SEQ ID NO: 55176 - DNA, 20 bp, synthetic construct
  misc_feature 1..20: note = chemically synthesized
  source 1..20: mol_type = other DNA
cctcctgcctcagcctccca

SEQ ID NO: 55177 - DNA, 20 bp, synthetic construct
  misc_feature 1..20: note = chemically synthesized
  source 1..20: mol_type = other DNA
gcctcagcctcccaaagtgc

SEQ ID NO: 55178 - DNA, 20 bp, synthetic construct
  misc_feature 1..20: note = chemically synthesized
  source 1..20: mol_type = other DNA
cctcagcctcccaaagtgct

SEQ ID NO: 55179 - DNA, 20 bp, synthetic construct
  misc_feature 1..20: note = chemically synthesized
  source 1..20: mol_type = other DNA
ctcccaaagtgctgggatta

SEQ ID NO: 55180 - DNA, 20 bp, synthetic construct
  misc_feature 1..20: note = chemically synthesized
  source 1..20: mol_type = other DNA
agtgctgggattacagatgt

SEQ ID NO: 55181 - DNA, 20 bp, synthetic construct
  misc_feature 1..20: note = chemically synthesized
  source 1..20: mol_type = other DNA
cagatgtgagccaccatgcc

SEQ ID NO: 55182 - DNA, 20 bp, synthetic construct
  misc_feature 1..20: note = chemically synthesized
  source 1..20: mol_type = other DNA
accatgcctggcctgataaa

SEQ ID NO: 55183 - DNA, 20 bp, synthetic construct
  misc_feature 1..20: note = chemically synthesized
  source 1..20: mol_type = other DNA
ataaacagataaataaaatg

SEQ ID NO: 55184 - DNA, 20 bp, synthetic construct
  misc_feature 1..20: note = chemically synthesized
  source 1..20: mol_type = other DNA
aatgttatatattcatacaa

SEQ ID NO: 55185 - DNA, 20 bp, synthetic construct
  misc_feature 1..20: note = chemically synthesized
  source 1..20: mol_type = other DNA
gaatattacttgtccataaa

SEQ ID NO: 55186 - DNA, 20 bp, synthetic construct
  misc_feature 1..20: note = chemically synthesized
  source 1..20: mol_type = other DNA
cttgtccataaaaagaaatg

SEQ ID NO: 55187 - DNA, 20 bp, synthetic construct
  misc_feature 1..20: note = chemically synthesized
  source 1..20: mol_type = other DNA
taccaatatatgttataaca

SEQ ID NO: 55188 - DNA, 20 bp, synthetic construct
  misc_feature 1..20: note = chemically synthesized
  source 1..20: mol_type = other DNA
aaccttgaaaacatcatgct

SEQ ID NO: 55189 - DNA, 20 bp, synthetic construct
  misc_feature 1..20: note = chemically synthesized
  source 1..20: mol_type = other DNA
gaaaacatcatgctaagtga

SEQ ID NO: 55190 - DNA, 20 bp, synthetic construct
  misc_feature 1..20: note = chemically synthesized
  source 1..20: mol_type = other DNA
aaacatcatgctaagtgaaa

SEQ ID NO: 55191 - DNA, 20 bp, synthetic construct
  misc_feature 1..20: note = chemically synthesized
  source 1..20: mol_type = other DNA
aacatcatgctaagtgaaag

SEQ ID NO: 55192 - DNA, 20 bp, synthetic construct
  misc_feature 1..20: note = chemically synthesized
  source 1..20: mol_type = other DNA
tcatgctaagtgaaagaggc

SEQ ID NO: 55193 - DNA, 20 bp, synthetic construct
  misc_feature 1..20: note = chemically synthesized
  source 1..20: mol_type = other DNA
gtgaaagaggccagacacaa

SEQ ID NO: 55194 - DNA, 20 bp, synthetic construct
  misc_feature 1..20: note = chemically synthesized
  source 1..20: mol_type = other DNA
tgaaagaggccagacacaaa

SEQ ID NO: 55195 - DNA, 20 bp, synthetic construct
  misc_feature 1..20: note = chemically synthesized
  source 1..20: mol_type = other DNA
acacaaaaggccacatattg

SEQ ID NO: 55196 - DNA, 20 bp, synthetic construct
  misc_feature 1..20: note = chemically synthesized
  source 1..20: mol_type = other DNA
cacaaaaggccacatattgt

SEQ ID NO: 55197 - DNA, 20 bp, synthetic construct
  misc_feature 1..20: note = chemically synthesized
  source 1..20: mol_type = other DNA
caaaaggccacatattgtag

SEQ ID NO: 55198 - DNA, 20 bp, synthetic construct
  misc_feature 1..20: note = chemically synthesized
  source 1..20: mol_type = other DNA
tttatatgaaatgccccaaa

SEQ ID NO: 55199 - DNA, 20 bp, synthetic construct
  misc_feature 1..20: note = chemically synthesized
  source 1..20: mol_type = other DNA
ttatatgaaatgccccaaat

SEQ ID NO: 55200 - DNA, 20 bp, synthetic construct
  misc_feature 1..20: note = chemically synthesized
  source 1..20: mol_type = other DNA
ccccaaataggcaaatctat

SEQ ID NO: 55201 - DNA, 20 bp, synthetic construct
  misc_feature 1..20: note = chemically synthesized
  source 1..20: mol_type = other DNA
aaataggcaaatctatgaga

SEQ ID NO: 55202 - DNA, 20 bp, synthetic construct
  misc_feature 1..20: note = chemically synthesized
  source 1..20: mol_type = other DNA
aggcaaatctatgagacaga

SEQ ID NO: 55203 - DNA, 20 bp, synthetic construct
  misc_feature 1..20: note = chemically synthesized
  source 1..20: mol_type = other DNA
caaatctatgagacagaaag

SEQ ID NO: 55204 - DNA, 20 bp, synthetic construct
  misc_feature 1..20: note = chemically synthesized
  source 1..20: mol_type = other DNA
ctatgagacagaaagtagat

SEQ ID NO: 55205 - DNA, 20 bp, synthetic construct
  misc_feature 1..20: note = chemically synthesized
  source 1..20: mol_type = other DNA
tgagacagaaagtagattag

SEQ ID NO: 55206 - DNA, 20 bp, synthetic construct
  misc_feature 1..20: note = chemically synthesized
  source 1..20: mol_type = other DNA
aaagtagattagtggttgcc

SEQ ID NO: 55207 - DNA, 20 bp, synthetic construct
  misc_feature 1..20: note = chemically synthesized
  source 1..20: mol_type = other DNA
aagtagattagtggttgcct

SEQ ID NO: 55208 - DNA, 20 bp, synthetic construct
  misc_feature 1..20: note = chemically synthesized
  source 1..20: mol_type = other DNA
attagtggttgcctaggctt

SEQ ID NO: 55209 - DNA, 20 bp, synthetic construct
  misc_feature 1..20: note = chemically synthesized
  source 1..20: mol_type = other DNA
agtggttgcctaggcttgag

SEQ ID NO: 55210 - DNA, 20 bp, synthetic construct
  misc_feature 1..20: note = chemically synthesized
  source 1..20: mol_type = other DNA
gtggttgcctaggcttgagt

SEQ ID NO: 55211 - DNA, 20 bp, synthetic construct
  misc_feature 1..20: note = chemically synthesized
  source 1..20: mol_type = other DNA
ttgcctaggcttgagtgggt

SEQ ID NO: 55212 - DNA, 20 bp, synthetic construct
  misc_feature 1..20: note = chemically synthesized
  source 1..20: mol_type = other DNA
gcctaggcttgagtgggttg

SEQ ID NO: 55213 - DNA, 20 bp, synthetic construct
  misc_feature 1..20: note = chemically synthesized
  source 1..20: mol_type = other DNA
taggcttgagtgggttggag

SEQ ID NO: 55214 - DNA, 20 bp, synthetic construct
  misc_feature 1..20: note = chemically synthesized
  source 1..20: mol_type = other DNA
ctgaattgtacactttaaat

SEQ ID NO: 55215 - DNA, 20 bp, synthetic construct
  misc_feature 1..20: note = chemically synthesized
  source 1..20: mol_type = other DNA
ctttaaatgagtgaattgta

SEQ ID NO: 55216 - DNA, 20 bp, synthetic construct
  misc_feature 1..20: note = chemically synthesized
  source 1..20: mol_type = other DNA
ggtattgtgaattatatctc

SEQ ID NO: 55217 - DNA, 20 bp, synthetic construct
  misc_feature 1..20: note = chemically synthesized
  source 1..20: mol_type = other DNA
ttatatctcaagctgttata

SEQ ID NO: 55218 - DNA, 20 bp, synthetic construct
  misc_feature 1..20: note = chemically synthesized
  source 1..20: mol_type = other DNA
atacagcttttttttttttt

SEQ ID NO: 55219 - DNA, 20 bp, synthetic construct
  misc_feature 1..20: note = chemically synthesized
  source 1..20: mol_type = other DNA
agctttttttttttttgaga

SEQ ID NO: 55220 - DNA, 20 bp, synthetic construct
  misc_feature 1..20: note = chemically synthesized
  source 1..20: mol_type = other DNA
ctttttttttttttgagatg

SEQ ID NO: 55221 - DNA, 20 bp, synthetic construct
  misc_feature 1..20: note = chemically synthesized
  source 1..20: mol_type = other DNA
ggagtttcactcttgttgcc

SEQ ID NO: 55222 - DNA, 20 bp, synthetic construct
  misc_feature 1..20: note = chemically synthesized
  source 1..20: mol_type = other DNA
gagtttcactcttgttgccc

SEQ ID NO: 55223 - DNA, 20 bp, synthetic construct
  misc_feature 1..20: note = chemically synthesized
  source 1..20: mol_type = other DNA
ttcactcttgttgcccaggt

SEQ ID NO: 55224 - DNA, 20 bp, synthetic construct
  misc_feature 1..20: note = chemically synthesized
  source 1..20: mol_type = other DNA
cactcttgttgcccaggttg

SEQ ID NO: 55225 - DNA, 20 bp, synthetic construct
  misc_feature 1..20: note = chemically synthesized
  source 1..20: mol_type = other DNA
ttgcccaggttggagtgcaa

SEQ ID NO: 55226 - DNA, 20 bp, synthetic construct
  misc_feature 1..20: note = chemically synthesized
  source 1..20: mol_type = other DNA
tggagtgcaatggtgtgatc

SEQ ID NO: 55227 - DNA, 20 bp, synthetic construct
  misc_feature 1..20: note = chemically synthesized
  source 1..20: mol_type = other DNA
ggagtgcaatggtgtgatct

SEQ ID NO: 55228 - DNA, 20 bp, synthetic construct
  misc_feature 1..20: note = chemically synthesized
  source 1..20: mol_type = other DNA
cactgcaacctctgcctccc

SEQ ID NO: 55229 - DNA, 20 bp, synthetic construct
  misc_feature 1..20: note = chemically synthesized
  source 1..20: mol_type = other DNA
aacctctgcctccccggttc

SEQ ID NO: 55230 - DNA, 20 bp, synthetic construct
  misc_feature 1..20: note = chemically synthesized
  source 1..20: mol_type = other DNA
ctctgcctccccggttcaag

SEQ ID NO: 55231 - DNA, 20 bp, synthetic construct
  misc_feature 1..20: note = chemically synthesized
  source 1..20: mol_type = other DNA
ttcaagcagttctcctgtct

SEQ ID NO: 55232 - DNA, 20 bp, synthetic construct
  misc_feature 1..20: note = chemically synthesized
  source 1..20: mol_type = other DNA
ttctcctgtctcagcctctc

SEQ ID NO: 55233 - DNA, 20 bp, synthetic construct
  misc_feature 1..20: note = chemically synthesized
  source 1..20: mol_type = other DNA
tcctgtctcagcctctcaag

SEQ ID NO: 55234 - DNA, 20 bp, synthetic construct
  misc_feature 1..20: note = chemically synthesized
  source 1..20: mol_type = other DNA
gtctcagcctctcaagtagc

SEQ ID NO: 55235 - DNA, 20 bp, synthetic construct
  misc_feature 1..20: note = chemically synthesized
  source 1..20: mol_type = other DNA
tctcagcctctcaagtagct

SEQ ID NO: 55236 - DNA, 20 bp, synthetic construct
  misc_feature 1..20: note = chemically synthesized
  source 1..20: mol_type = other DNA
catgcatgtgccaccacgtc

SEQ ID NO: 55237 - DNA, 20 bp, synthetic construct
  misc_feature 1..20: note = chemically synthesized
  source 1..20: mol_type = other DNA
tggctaattttttgtatttt

SEQ ID NO: 55238 - DNA, 20 bp, synthetic construct
  misc_feature 1..20: note = chemically synthesized
  source 1..20: mol_type = other DNA
ctaattttttgtatttttag

SEQ ID NO: 55239 - DNA, 20 bp, synthetic construct
  misc_feature 1..20: note = chemically synthesized
  source 1..20: mol_type = other DNA
aattttttgtatttttagta

SEQ ID NO: 55240 - DNA, 20 bp, synthetic construct
  misc_feature 1..20: note = chemically synthesized
  source 1..20: mol_type = other DNA
ttgtatttttagtagagacg

SEQ ID NO: 55241 - DNA, 20 bp, synthetic construct
  misc_feature 1..20: note = chemically synthesized
  source 1..20: mol_type = other DNA
gagacgcggtttcaccatgt

SEQ ID NO: 55242 - DNA, 20 bp, synthetic construct
  misc_feature 1..20: note = chemically synthesized
  source 1..20: mol_type = other DNA
cgcggtttcaccatgttggt

SEQ ID NO: 55243 - DNA, 20 bp, synthetic construct
  misc_feature 1..20: note = chemically synthesized
  source 1..20: mol_type = other DNA
gcggtttcaccatgttggtc

SEQ ID NO: 55244 - DNA, 20 bp, synthetic construct
  misc_feature 1..20: note = chemically synthesized
  source 1..20: mol_type = other DNA
tcaggtcgaactcctgatct

SEQ ID NO: 55245 - DNA, 20 bp, synthetic construct
  misc_feature 1..20: note = chemically synthesized
  source 1..20: mol_type = other DNA
caggtcgaactcctgatctc

SEQ ID NO: 55246 - DNA, 20 bp, synthetic construct
  misc_feature 1..20: note = chemically synthesized
  source 1..20: mol_type = other DNA
ctcaggtgatctgcctgcct

SEQ ID NO: 55247 - DNA, 20 bp, synthetic construct
  misc_feature 1..20: note = chemically synthesized
  source 1..20: mol_type = other DNA
ctgcctgccttggcttccca

SEQ ID NO: 55248 - DNA, 20 bp, synthetic construct
  misc_feature 1..20: note = chemically synthesized
  source 1..20: mol_type = other DNA
gccttggcttcccaaagtgc

SEQ ID NO: 55249 - DNA, 20 bp, synthetic construct
  misc_feature 1..20: note = chemically synthesized
  source 1..20: mol_type = other DNA
ccttggcttcccaaagtgct

SEQ ID NO: 55250 - DNA, 20 bp, synthetic construct
  misc_feature 1..20: note = chemically synthesized
  source 1..20: mol_type = other DNA
ttcccaaagtgctgggatta

SEQ ID NO: 55251 - DNA, 20 bp, synthetic construct
  misc_feature 1..20: note = chemically synthesized
  source 1..20: mol_type = other DNA
tcccaaagtgctgggattac

SEQ ID NO: 55252 - DNA, 20 bp, synthetic construct
  misc_feature 1..20: note = chemically synthesized
  source 1..20: mol_type = other DNA
agtgctgggattacaggcat

SEQ ID NO: 55253 - DNA, 20 bp, synthetic construct
  misc_feature 1..20: note = chemically synthesized
  source 1..20: mol_type = other DNA
caggcatgagccaccgtgcc

SEQ ID NO: 55254 - DNA, 20 bp, synthetic construct
  misc_feature 1..20: note = chemically synthesized
  source 1..20: mol_type = other DNA
ccttgttatacatttttttt

SEQ ID NO: 55255 - DNA, 20 bp, synthetic construct
  misc_feature 1..20: note = chemically synthesized
  source 1..20: mol_type = other DNA
cttgttatacatttttttta

SEQ ID NO: 55256 - DNA, 20 bp, synthetic construct
  misc_feature 1..20: note = chemically synthesized
  source 1..20: mol_type = other DNA
tttgttaaaaatcaaaaaca

SEQ ID NO: 55257 - DNA, 20 bp, synthetic construct
  misc_feature 1..20: note = chemically synthesized
  source 1..20: mol_type = other DNA
taaaaatcaaaaacatggct

SEQ ID NO: 55258 - DNA, 20 bp, synthetic construct
  misc_feature 1..20: note = chemically synthesized
  source 1..20: mol_type = other DNA
atcaaaaacatggctgagtg

SEQ ID NO: 55259 - DNA, 20 bp, synthetic construct
  misc_feature 1..20: note = chemically synthesized
  source 1..20: mol_type = other DNA
aaaaacatggctgagtgcag

SEQ ID NO: 55260 - DNA, 20 bp, synthetic construct
  misc_feature 1..20: note = chemically synthesized
  source 1..20: mol_type = other DNA
gcagctcatgcctgttatcc

SEQ ID NO: 55261 - DNA, 20 bp, synthetic construct
  misc_feature 1..20: note = chemically synthesized
  source 1..20: mol_type = other DNA
tgcctgttatcccagcactt

SEQ ID NO: 55262 - DNA, 20 bp, synthetic construct
  misc_feature 1..20: note = chemically synthesized
  source 1..20: mol_type = other DNA
gcctgttatcccagcacttt

SEQ ID NO: 55263 - DNA, 20 bp, synthetic construct
  misc_feature 1..20: note = chemically synthesized
  source 1..20: mol_type = other DNA
ctgttatcccagcactttgg

SEQ ID NO: 55264 - DNA, 20 bp, synthetic construct
  misc_feature 1..20: note = chemically synthesized
  source 1..20: mol_type = other DNA
tgttatcccagcactttggg

SEQ ID NO: 55265 - DNA, 20 bp, synthetic construct
  misc_feature 1..20: note = chemically synthesized
  source 1..20: mol_type = other DNA
tcccagcactttgggaggct

SEQ ID NO: 55266 - DNA, 20 bp, synthetic construct
  misc_feature 1..20: note = chemically synthesized
  source 1..20: mol_type = other DNA
cccagcactttgggaggcta

SEQ ID NO: 55267 - DNA, 20 bp, synthetic construct
  misc_feature 1..20: note = chemically synthesized
  source 1..20: mol_type = other DNA
agcactttgggaggctaagg

SEQ ID NO: 55268 - DNA, 20 bp, synthetic construct
  misc_feature 1..20: note = chemically synthesized
  source 1..20: mol_type = other DNA
gcactttgggaggctaaggc

SEQ ID NO: 55269 - DNA, 20 bp, synthetic construct
  misc_feature 1..20: note = chemically synthesized
  source 1..20: mol_type = other DNA
actttgggaggctaaggcgg

SEQ ID NO: 55270 - DNA, 20 bp, synthetic construct
  misc_feature 1..20: note = chemically synthesized
  source 1..20: mol_type = other DNA
ctttgggaggctaaggcggg

SEQ ID NO: 55271 - DNA, 20 bp, synthetic construct
  misc_feature 1..20: note = chemically synthesized
  source 1..20: mol_type = other DNA
gctaaggcgggaggatgctt

SEQ ID NO: 55272 - DNA, 20 bp, synthetic construct
  misc_feature 1..20: note = chemically synthesized
  source 1..20: mol_type = other DNA
tctacaaaaaataaaaaaat

SEQ ID NO: 55273 - DNA, 20 bp, synthetic construct
  misc_feature 1..20: note = chemically synthesized
  source 1..20: mol_type = other DNA
caaaaaataaaaaaattagc

SEQ ID NO: 55274 - DNA, 20 bp, synthetic construct
  misc_feature 1..20: note = chemically synthesized
  source 1..20: mol_type = other DNA
aaaaaataaaaaaattagcc

SEQ ID NO: 55275 - DNA, 20 bp, synthetic construct
  misc_feature 1..20: note = chemically synthesized
  source 1..20: mol_type = other DNA
ataaaaaaattagccaggca

SEQ ID NO: 55276 - DNA, 20 bp, synthetic construct
  misc_feature 1..20: note = chemically synthesized
  source 1..20: mol_type = other DNA
aaaaaattagccaggcatgg

SEQ ID NO: 55277 - DNA, 20 bp, synthetic construct
  misc_feature 1..20: note = chemically synthesized
  source 1..20: mol_type = other DNA
ggcatggtggtacgcatctg

SEQ ID NO: 55278 - DNA, 20 bp, synthetic construct
  misc_feature 1..20: note = chemically synthesized
  source 1..20: mol_type = other DNA
gtggtacgcatctgtagtcc

SEQ ID NO: 55279 - DNA, 20 bp, synthetic construct
  misc_feature 1..20: note = chemically synthesized
  source 1..20: mol_type = other DNA
catctgtagtcccagctatt

SEQ ID NO: 55280 - DNA, 20 bp, synthetic construct
  misc_feature 1..20: note = chemically synthesized
  source 1..20: mol_type = other DNA
atctgtagtcccagctattc

SEQ ID NO: 55281 - DNA, 20 bp, synthetic construct
  misc_feature 1..20: note = chemically synthesized
  source 1..20: mol_type = other DNA
ctgtagtcccagctattcgg

SEQ ID NO: 55282 - DNA, 20 bp, synthetic construct
  misc_feature 1..20: note = chemically synthesized
  source 1..20: mol_type = other DNA
tgtagtcccagctattcggg

SEQ ID NO: 55283 - DNA, 20 bp, synthetic construct
  misc_feature 1..20: note = chemically synthesized
  source 1..20: mol_type = other DNA
tcccagctattcgggaggct

SEQ ID NO: 55284 - DNA, 20 bp, synthetic construct
  misc_feature 1..20: note = chemically synthesized
  source 1..20: mol_type = other DNA
cccagctattcgggaggctg

SEQ ID NO: 55285 - DNA, 20 bp, synthetic construct
  misc_feature 1..20: note = chemically synthesized
  source 1..20: mol_type = other DNA
gctattcgggaggctgaggc

SEQ ID NO: 55286 - DNA, 20 bp, synthetic construct
  misc_feature 1..20: note = chemically synthesized
  source 1..20: mol_type = other DNA
tattcgggaggctgaggctg

SEQ ID NO: 55287 - DNA, 20 bp, synthetic construct
  misc_feature 1..20: note = chemically synthesized
  source 1..20: mol_type = other DNA
attcgggaggctgaggctgg

SEQ ID NO: 55288 - DNA, 20 bp, synthetic construct
  misc_feature 1..20: note = chemically synthesized
  source 1..20: mol_type = other DNA
ctgaggctggaggatcattt

SEQ ID NO: 55289 - DNA, 20 bp, synthetic construct
  misc_feature 1..20: note = chemically synthesized
  source 1..20: mol_type = other DNA
ctggaggatcatttgagccc

SEQ ID NO: 55290 - DNA, 20 bp, synthetic construct
  misc_feature 1..20: note = chemically synthesized
  source 1..20: mol_type = other DNA
tggaggatcatttgagcccc

SEQ ID NO: 55291 - DNA, 20 bp, synthetic construct
  misc_feature 1..20: note = chemically synthesized
  source 1..20: mol_type = other DNA
gaggatcatttgagccccag

SEQ ID NO: 55292 - DNA, 20 bp, synthetic construct
  misc_feature 1..20: note = chemically synthesized
  source 1..20: mol_type = other DNA
atcatttgagccccaggagt

SEQ ID NO: 55293 - DNA, 20 bp, synthetic construct
  misc_feature 1..20: note = chemically synthesized
  source 1..20: mol_type = other DNA
catttgagccccaggagttg

SEQ ID NO: 55294 - DNA, 20 bp, synthetic construct
  misc_feature 1..20: note = chemically synthesized
  source 1..20: mol_type = other DNA
atttgagccccaggagttgg

SEQ ID NO: 55295 - DNA, 20 bp, synthetic construct
  misc_feature 1..20: note = chemically synthesized
  source 1..20: mol_type = other DNA
gccccaggagttggaggttg

SEQ ID NO: 55296 - DNA, 20 bp, synthetic construct
  misc_feature 1..20: note = chemically synthesized
  source 1..20: mol_type = other DNA
caggagttggaggttgcagt

SEQ ID NO: 55297 - DNA, 20 bp, synthetic construct
  misc_feature 1..20: note = chemically synthesized
  source 1..20: mol_type = other DNA
gttggaggttgcagtgagct

SEQ ID NO: 55298 - DNA, 20 bp, synthetic construct
  misc_feature 1..20: note = chemically synthesized
  source 1..20: mol_type = other DNA
gagattgcgccattgcaccc

SEQ ID NO: 55299 - DNA, 20 bp, synthetic construct
  misc_feature 1..20: note = chemically synthesized
  source 1..20: mol_type = other DNA
tgcgccattgcaccccagcc

SEQ ID NO: 55300 - DNA, 20 bp, synthetic construct
  misc_feature 1..20: note = chemically synthesized
  source 1..20: mol_type = other DNA
gcgccattgcaccccagcct

SEQ ID NO: 55301 - DNA, 20 bp, synthetic construct
  misc_feature 1..20: note = chemically synthesized
  source 1..20: mol_type = other DNA
ttgcaccccagcctgggtga

SEQ ID NO: 55302 - DNA, 20 bp, synthetic construct
  misc_feature 1..20: note = chemically synthesized
  source 1..20: mol_type = other DNA
gcaccccagcctgggtgaca

SEQ ID NO: 55303 - DNA, 20 bp, synthetic construct
  misc_feature 1..20: note = chemically synthesized
  source 1..20: mol_type = other DNA
cccagcctgggtgacagagt

SEQ ID NO: 55304 - DNA, 20 bp, synthetic construct
  misc_feature 1..20: note = chemically synthesized
  source 1..20: mol_type = other DNA
aaaataaaataaaataaaat

SEQ ID NO: 55305 - DNA, 20 bp, synthetic construct
  misc_feature 1..20: note = chemically synthesized
  source 1..20: mol_type = other DNA
ataagataaaataaaataaa

SEQ ID NO: 55306 - DNA, 20 bp, synthetic construct
  misc_feature 1..20: note = chemically synthesized
  source 1..20: mol_type = other DNA
aaccaaaaccacaaaaacct

SEQ ID NO: 55307 - DNA, 20 bp, synthetic construct
  misc_feature 1..20: note = chemically synthesized
  source 1..20: mol_type = other DNA
accacaaaaacctaagcctt

SEQ ID NO: 55308 - DNA, 20 bp, synthetic construct
  misc_feature 1..20: note = chemically synthesized
  source 1..20: mol_type = other DNA
cctttggtctatgtgtgatg

SEQ ID NO: 55309 - DNA, 20 bp, synthetic construct
  misc_feature 1..20: note = chemically synthesized
  source 1..20: mol_type = other DNA
ttggtctatgtgtgatgtgg

SEQ ID NO: 55310 - DNA, 20 bp, synthetic construct
  misc_feature 1..20: note = chemically synthesized
  source 1..20: mol_type = other DNA
tatgtgtgatgtggcagcac

SEQ ID NO: 55311 - DNA, 20 bp, synthetic construct
  misc_feature 1..20: note = chemically synthesized
  source 1..20: mol_type = other DNA
tgtggcagcactggtccacg

SEQ ID NO: 55312 - DNA, 20 bp, synthetic construct
  misc_feature 1..20: note = chemically synthesized
  source 1..20: mol_type = other DNA
ggcagcactggtccacgcag

SEQ ID NO: 55313 - DNA, 20 bp, synthetic construct
  misc_feature 1..20: note = chemically synthesized
  source 1..20: mol_type = other DNA
agcactggtccacgcagcag

SEQ ID NO: 55314 - DNA, 20 bp, synthetic construct
  misc_feature 1..20: note = chemically synthesized
  source 1..20: mol_type = other DNA
ctggtccacgcagcagaagt

SEQ ID NO: 55315 - DNA, 20 bp, synthetic construct
  misc_feature 1..20: note = chemically synthesized
  source 1..20: mol_type = other DNA
cagaagttggacttccttaa

SEQ ID NO: 55316 - DNA, 20 bp, synthetic construct
  misc_feature 1..20: note = chemically synthesized
  source 1..20: mol_type = other DNA
agaagttggacttccttaat

SEQ ID NO: 55317 - DNA, 20 bp, synthetic construct
  misc_feature 1..20: note = chemically synthesized
  source 1..20: mol_type = other DNA
cttaatgggtctattttctt

SEQ ID NO: 55318 - DNA, 20 bp, synthetic construct
  misc_feature 1..20: note = chemically synthesized
  source 1..20: mol_type = other DNA
ttaatgggtctattttcttt

SEQ ID NO: 55319 - DNA, 20 bp, synthetic construct
  misc_feature 1..20: note = chemically synthesized
  source 1..20: mol_type = other DNA
ctattttctttgggcaataa

SEQ ID NO: 55320 - DNA, 20 bp, synthetic construct
  misc_feature 1..20: note = chemically synthesized
  source 1..20: mol_type = other DNA
tgtgtgtgtgtatcatcctc

SEQ ID NO: 55321 - DNA, 20 bp, synthetic construct
  misc_feature 1..20: note = chemically synthesized
  source 1..20: mol_type = other DNA
cctgaaaactgatacactac

SEQ ID NO: 55322 - DNA, 20 bp, synthetic construct
  misc_feature 1..20: note = chemically synthesized
  source 1..20: mol_type = other DNA
aattatgccataacatgaca

SEQ ID NO: 55323 - DNA, 20 bp, synthetic construct
  misc_feature 1..20: note = chemically synthesized
  source 1..20: mol_type = other DNA
ccttgctttaaaactgtcat

SEQ ID NO: 55324 - DNA, 20 bp, synthetic construct
  misc_feature 1..20: note = chemically synthesized
  source 1..20: mol_type = other DNA
gtcacttaaacttgcctcac

SEQ ID NO: 55325 - DNA, 20 bp, synthetic construct
  misc_feature 1..20: note = chemically synthesized
  source 1..20: mol_type = other DNA
tgcctcacaagccatttcta

SEQ ID NO: 55326 - DNA, 20 bp, synthetic construct
  misc_feature 1..20: note = chemically synthesized
  source 1..20: mol_type = other DNA
ctcacaagccatttctaaag

SEQ ID NO: 55327 - DNA, 20 bp, synthetic construct
  misc_feature 1..20: note = chemically synthesized
  source 1..20: mol_type = other DNA
gtggacgtaaatctataact

SEQ ID NO: 55328 - DNA, 20 bp, synthetic construct
  misc_feature 1..20: note = chemically synthesized
  source 1..20: mol_type = other DNA
tggacgtaaatctataactt

SEQ ID NO: 55329 - DNA, 20 bp, synthetic construct
  misc_feature 1..20: note = chemically synthesized
  source 1..20: mol_type = other DNA
ggacgtaaatctataactta

SEQ ID NO: 55330 - DNA, 20 bp, synthetic construct
  misc_feature 1..20: note = chemically synthesized
  source 1..20: mol_type = other DNA
taaatctataacttagggaa

SEQ ID NO: 55331 - DNA, 20 bp, synthetic construct
  misc_feature 1..20: note = chemically synthesized
  source 1..20: mol_type = other DNA
ctataacttagggaacagat

SEQ ID NO: 55332 - DNA, 20 bp, synthetic construct
  misc_feature 1..20: note = chemically synthesized
  source 1..20: mol_type = other DNA
atcaaaatgttctgtctaat

SEQ ID NO: 55333 - DNA, 20 bp, synthetic construct
  misc_feature 1..20: note = chemically synthesized
  source 1..20: mol_type = other DNA
aaaatgttctgtctaataag

SEQ ID NO: 55334 - DNA, 20 bp, synthetic construct
  misc_feature 1..20: note = chemically synthesized
  source 1..20: mol_type = other DNA
aaatgttctgtctaataagc

SEQ ID NO: 55335 - DNA, 20 bp, synthetic construct
  misc_feature 1..20: note = chemically synthesized
  source 1..20: mol_type = other DNA
caaaatgattattttgtatc

SEQ ID NO: 55336 - DNA, 20 bp, synthetic construct
  misc_feature 1..20: note = chemically synthesized
  source 1..20: mol_type = other DNA
aaaatgattattttgtatct

SEQ ID NO: 55337 - DNA, 20 bp, synthetic construct
  misc_feature 1..20: note = chemically synthesized
  source 1..20: mol_type = other DNA
ttattttgtatctgggatta

SEQ ID NO: 55338 - DNA, 20 bp, synthetic construct
  misc_feature 1..20: note = chemically synthesized
  source 1..20: mol_type = other DNA
tattttgtatctgggattac

SEQ ID NO: 55339 - DNA, 20 bp, synthetic construct
  misc_feature 1..20: note = chemically synthesized
  source 1..20: mol_type = other DNA
gtatctgggattacaggcgc

SEQ ID NO: 55340 - DNA, 20 bp, synthetic construct
  misc_feature 1..20: note = chemically synthesized
  source 1..20: mol_type = other DNA
gggattacaggcgcgagcca

SEQ ID NO: 55341 - DNA, 20 bp, synthetic construct
  misc_feature 1..20: note = chemically synthesized
  source 1..20: mol_type = other DNA
caggcgcgagccacagcacc

SEQ ID NO: 55342 - DNA, 20 bp, synthetic construct
  misc_feature 1..20: note = chemically synthesized
  source 1..20: mol_type = other DNA
gcgagccacagcacccagcc

SEQ ID NO: 55343 - DNA, 20 bp, synthetic construct
  misc_feature 1..20: note = chemically synthesized
  source 1..20: mol_type = other DNA
tcttttttttttttttttct

SEQ ID NO: 55344 - DNA, 20 bp, synthetic construct
  misc_feature 1..20: note = chemically synthesized
  source 1..20: mol_type = other DNA
ttttttttttttttctgaga

SEQ ID NO: 55345 - DNA, 20 bp, synthetic construct
  misc_feature 1..20: note = chemically synthesized
  source 1..20: mol_type = other DNA
tttttttttttttctgagac

SEQ ID NO: 55346 - DNA, 20 bp, synthetic construct
  misc_feature 1..20: note = chemically synthesized
  source 1..20: mol_type = other DNA
ttttttttttttctgagaca

SEQ ID NO: 55347 - DNA, 20 bp, synthetic construct
  misc_feature 1..20: note = chemically synthesized
  source 1..20: mol_type = other DNA
cagggtctcactctgtcacc

SEQ ID NO: 55348 - DNA, 20 bp, synthetic construct
  misc_feature 1..20: note = chemically synthesized
  source 1..20: mol_type = other DNA
agggtctcactctgtcaccc

SEQ ID NO: 55349 - DNA, 20 bp, synthetic construct
  misc_feature 1..20: note = chemically synthesized
  source 1..20: mol_type = other DNA
tctcactctgtcacccaggc

SEQ ID NO: 55350 - DNA, 20 bp, synthetic construct
  misc_feature 1..20: note = chemically synthesized
  source 1..20: mol_type = other DNA
tcactctgtcacccaggctg

SEQ ID NO: 55351 - DNA, 20 bp, synthetic construct
  misc_feature 1..20: note = chemically synthesized
  source 1..20: mol_type = other DNA
ctgtcacccaggctggagtg

SEQ ID NO: 55352 - DNA, 20 bp, synthetic construct
  misc_feature 1..20: note = chemically synthesized
  source 1..20: mol_type = other DNA
tcacccaggctggagtgcag

SEQ ID NO: 55353 - DNA, 20 bp, synthetic construct
  misc_feature 1..20: note = chemically synthesized
  source 1..20: mol_type = other DNA
ggagtgcagtggcataatct

SEQ ID NO: 55354 - DNA, 20 bp, synthetic construct
  misc_feature 1..20: note = chemically synthesized
  source 1..20: mol_type = other DNA
cttggctcactgcaacctct

SEQ ID NO: 55355 - DNA, 20 bp, synthetic construct
  misc_feature 1..20: note = chemically synthesized
  source 1..20: mol_type = other DNA
tcactgcaacctctgagctc

SEQ ID NO: 55356 - DNA, 20 bp, synthetic construct
  misc_feature 1..20: note = chemically synthesized
  source 1..20: mol_type = other DNA
cactgcaacctctgagctca

SEQ ID NO: 55357 - DNA, 20 bp, synthetic construct
  misc_feature 1..20: note = chemically synthesized
  source 1..20: mol_type = other DNA
actgcaacctctgagctcaa

SEQ ID NO: 55358 - DNA, 20 bp, synthetic construct
  misc_feature 1..20: note = chemically synthesized
  source 1..20: mol_type = other DNA
ctcaagggattctcccacct

SEQ ID NO: 55359 - DNA, 20 bp, synthetic construct
  misc_feature 1..20: note = chemically synthesized
  source 1..20: mol_type = other DNA
ttctcccacctcagccacct

SEQ ID NO: 55360 - DNA, 20 bp, synthetic construct
  misc_feature 1..20: note = chemically synthesized
  source 1..20: mol_type = other DNA
tcccacctcagccacctgag

SEQ ID NO: 55361 - DNA, 20 bp, synthetic construct
  misc_feature 1..20: note = chemically synthesized
  source 1..20: mol_type = other DNA
acctcagccacctgagtagt

SEQ ID NO: 55362 - DNA, 20 bp, synthetic construct
  misc_feature 1..20: note = chemically synthesized
  source 1..20: mol_type = other DNA
cctcagccacctgagtagtt

SEQ ID NO: 55363 - DNA, 20 bp, synthetic construct
  misc_feature 1..20: note = chemically synthesized
  source 1..20: mol_type = other DNA
cacctgagtagttaggacca

SEQ ID NO: 55364 - DNA, 20 bp, synthetic construct
  misc_feature 1..20: note = chemically synthesized
  source 1..20: mol_type = other DNA
acctgagtagttaggaccac

SEQ ID NO: 55365 - DNA, 20 bp, synthetic construct
  misc_feature 1..20: note = chemically synthesized
  source 1..20: mol_type = other DNA
caggcatgcaccaccacgct

SEQ ID NO: 55366 - DNA, 20 bp, synthetic construct
  misc_feature 1..20: note = chemically synthesized
  source 1..20: mol_type = other DNA
tggctaatgttttgtatttt

SEQ ID NO: 55367 - DNA, 20 bp, synthetic construct
  misc_feature 1..20: note = chemically synthesized
  source 1..20: mol_type = other DNA
aatgttttgtatttttggta

SEQ ID NO: 55368 - DNA, 20 bp, synthetic construct
  misc_feature 1..20: note = chemically synthesized
  source 1..20: mol_type = other DNA
ttttgtatttttggtataga

SEQ ID NO: 55369 - DNA, 20 bp, synthetic construct
  misc_feature 1..20: note = chemically synthesized
  source 1..20: mol_type = other DNA
tttgtatttttggtatagac

SEQ ID NO: 55370 - DNA, 20 bp, synthetic construct
  misc_feature 1..20: note = chemically synthesized
  source 1..20: mol_type = other DNA
ttgtatttttggtatagacg

SEQ ID NO: 55371 - DNA, 20 bp, synthetic construct
  misc_feature 1..20: note = chemically synthesized
  source 1..20: mol_type = other DNA
tgtatttttggtatagacgg

SEQ ID NO: 55372 - DNA, 20 bp, synthetic construct
  misc_feature 1..20: note = chemically synthesized
  source 1..20: mol_type = other DNA
gggggtctcaccatgttgcc

SEQ ID NO: 55373 - DNA, 20 bp, synthetic construct
  misc_feature 1..20: note = chemically synthesized
  source 1..20: mol_type = other DNA
ggggtctcaccatgttgccc

SEQ ID NO: 55374 - DNA, 20 bp, synthetic construct
  misc_feature 1..20: note = chemically synthesized
  source 1..20: mol_type = other DNA
tctcaccatgttgcccaggc

SEQ ID NO: 55375 - DNA, 20 bp, synthetic construct
  misc_feature 1..20: note = chemically synthesized
  source 1..20: mol_type = other DNA
caggctggtctcgaactcct

SEQ ID NO: 55376 - DNA, 20 bp, synthetic construct
  misc_feature 1..20: note = chemically synthesized
  source 1..20: mol_type = other DNA
tggtctcgaactcctgagct

SEQ ID NO: 55377 - DNA, 20 bp, synthetic construct
  misc_feature 1..20: note = chemically synthesized
  source 1..20: mol_type = other DNA
ggtctcgaactcctgagctc

SEQ ID NO: 55378 - DNA, 20 bp, synthetic construct
  misc_feature 1..20: note = chemically synthesized
  source 1..20: mol_type = other DNA
gctcaggcaatctgccacct

SEQ ID NO: 55379 - DNA, 20 bp, synthetic construct
  misc_feature 1..20: note = chemically synthesized
  source 1..20: mol_type = other DNA
tctgccacctcagcctccca

SEQ ID NO: 55380 - DNA, 20 bp, synthetic construct
  misc_feature 1..20: note = chemically synthesized
  source 1..20: mol_type = other DNA
acctcagcctcccaaagtgc

SEQ ID NO: 55381 - DNA, 20 bp, synthetic construct
  misc_feature 1..20: note = chemically synthesized
  source 1..20: mol_type = other DNA
cctcagcctcccaaagtgct

SEQ ID NO: 55382 - DNA, 20 bp, synthetic construct
  misc_feature 1..20: note = chemically synthesized
  source 1..20: mol_type = other DNA
ctcccaaagtgctgggatta

SEQ ID NO: 55383 - DNA, 20 bp, synthetic construct
  misc_feature 1..20: note = chemically synthesized
  source 1..20: mol_type = other DNA
agtgctgggattacagatgt

SEQ ID NO: 55384 - DNA, 20 bp, synthetic construct
  misc_feature 1..20: note = chemically synthesized
  source 1..20: mol_type = other DNA
cagatgtgagccaccatgcc

SEQ ID NO: 55385 - DNA, 20 bp, synthetic construct
  misc_feature 1..20: note = chemically synthesized
  source 1..20: mol_type = other DNA
gtgagccaccatgcccagcc

SEQ ID NO: 55386 - DNA, 20 bp, synthetic construct
  misc_feature 1..20: note = chemically synthesized
  source 1..20: mol_type = other DNA
agactgcctgatccttaacc

SEQ ID NO: 55387 - DNA, 20 bp, synthetic construct
  misc_feature 1..20: note = chemically synthesized
  source 1..20: mol_type = other DNA
ttaacctggttccaccattc

SEQ ID NO: 55388 - DNA, 20 bp, synthetic construct
  misc_feature 1..20: note = chemically synthesized
  source 1..20: mol_type = other DNA
ctggttccaccattctggac

SEQ ID NO: 55389 - DNA, 20 bp, synthetic construct
  misc_feature 1..20: note = chemically synthesized
  source 1..20: mol_type = other DNA
gacaagatgactaacccctc

SEQ ID NO: 55390 - DNA, 20 bp, synthetic construct
  misc_feature 1..20: note = chemically synthesized
  source 1..20: mol_type = other DNA
tctggacctatttgtaatat

SEQ ID NO: 55391 - DNA, 20 bp, synthetic construct
  misc_feature 1..20: note = chemically synthesized
  source 1..20: mol_type = other DNA
ctggacctatttgtaatata

SEQ ID NO: 55392 - DNA, 20 bp, synthetic construct
  misc_feature 1..20: note = chemically synthesized
  source 1..20: mol_type = other DNA
tgtaatataaggataaatga

SEQ ID NO: 55393 - DNA, 20 bp, synthetic construct
  misc_feature 1..20: note = chemically synthesized
  source 1..20: mol_type = other DNA
aatataaggataaatgacag

SEQ ID NO: 55394 - DNA, 20 bp, synthetic construct
  misc_feature 1..20: note = chemically synthesized
  source 1..20: mol_type = other DNA
aaatgacagtagccaactca

SEQ ID NO: 55395 - DNA, 20 bp, synthetic construct
  misc_feature 1..20: note = chemically synthesized
  source 1..20: mol_type = other DNA
atgacagtagccaactcaca

SEQ ID NO: 55396 - DNA, 20 bp, synthetic construct
  misc_feature 1..20: note = chemically synthesized
  source 1..20: mol_type = other DNA
tagccaactcacagagatgt

SEQ ID NO: 55397 - DNA, 20 bp, synthetic construct
  misc_feature 1..20: note = chemically synthesized
  source 1..20: mol_type = other DNA
agccaactcacagagatgtt

SEQ ID NO: 55398 - DNA, 20 bp, synthetic construct
  misc_feature 1..20: note = chemically synthesized
  source 1..20: mol_type = other DNA
ccaactcacagagatgttgg

SEQ ID NO: 55399 - DNA, 20 bp, synthetic construct
  misc_feature 1..20: note = chemically synthesized
  source 1..20: mol_type = other DNA
acagagatgttgggagaact

SEQ ID NO: 55400 - DNA, 20 bp, synthetic construct
  misc_feature 1..20: note = chemically synthesized
  source 1..20: mol_type = other DNA
agatgttgggagaactaagc

SEQ ID NO: 55401 - DNA, 20 bp, synthetic construct
  misc_feature 1..20: note = chemically synthesized
  source 1..20: mol_type = other DNA
gcgagttaattgtataaata

SEQ ID NO: 55402 - DNA, 20 bp, synthetic construct
  misc_feature 1..20: note = chemically synthesized
  source 1..20: mol_type = other DNA
aattgtataaataaagtaca

SEQ ID NO: 55403 - DNA, 20 bp, synthetic construct
  misc_feature 1..20: note = chemically synthesized
  source 1..20: mol_type = other DNA
tataaataaagtacatagaa

SEQ ID NO: 55404 - DNA, 20 bp, synthetic construct
  misc_feature 1..20: note = chemically synthesized
  source 1..20: mol_type = other DNA
aaagtacatagaacagaatc

SEQ ID NO: 55405 - DNA, 20 bp, synthetic construct
  misc_feature 1..20: note = chemically synthesized
  source 1..20: mol_type = other DNA
atagaacagaatctggcata

SEQ ID NO: 55406 - DNA, 20 bp, synthetic construct
  misc_feature 1..20: note = chemically synthesized
  source 1..20: mol_type = other DNA
aacagaatctggcataaagt

SEQ ID NO: 55407 - DNA, 20 bp, synthetic construct
  misc_feature 1..20: note = chemically synthesized
  source 1..20: mol_type = other DNA
cttatcaacctcataaactt

SEQ ID NO: 55408 - DNA, 20 bp, synthetic construct
  misc_feature 1..20: note = chemically synthesized
  source 1..20: mol_type = other DNA
ttatcaacctcataaacttc

SEQ ID NO: 55409 - DNA, 20 bp, synthetic construct
  misc_feature 1..20: note = chemically synthesized
  source 1..20: mol_type = other DNA
tatcaacctcataaacttca

SEQ ID NO: 55410 - DNA, 20 bp, synthetic construct
  misc_feature 1..20: note = chemically synthesized
  source 1..20: mol_type = other DNA
tcaacctcataaacttcagg

SEQ ID NO: 55411 - DNA, 20 bp, synthetic construct
  misc_feature 1..20: note = chemically synthesized
  source 1..20: mol_type = other DNA
acctcataaacttcagggag

SEQ ID NO: 55412 - DNA, 20 bp, synthetic construct
  misc_feature 1..20: note = chemically synthesized
  source 1..20: mol_type = other DNA
cctcataaacttcagggagt

SEQ ID NO: 55413 - DNA, 20 bp, synthetic construct
  misc_feature 1..20: note = chemically synthesized
  source 1..20: mol_type = other DNA
ctcataaacttcagggagtg

SEQ ID NO: 55414 - DNA, 20 bp, synthetic construct
  misc_feature 1..20: note = chemically synthesized
  source 1..20: mol_type = other DNA
tcataaacttcagggagtgg

SEQ ID NO: 55415 - DNA, 20 bp, synthetic construct
  misc_feature 1..20: note = chemically synthesized
  source 1..20: mol_type = other DNA
taaacttcagggagtggggg

SEQ ID NO: 55416 - DNA, 20 bp, synthetic construct
  misc_feature 1..20: note = chemically synthesized
  source 1..20: mol_type = other DNA
tgggggcagtatttactttc

SEQ ID NO: 55417 - DNA, 20 bp, synthetic construct
  misc_feature 1..20: note = chemically synthesized
  source 1..20: mol_type = other DNA
gggcagtatttactttctgg

SEQ ID NO: 55418 - DNA, 20 bp, synthetic construct
  misc_feature 1..20: note = chemically synthesized
  source 1..20: mol_type = other DNA
ttctggcagacctttcttgt

SEQ ID NO: 55419 - DNA, 20 bp, synthetic construct
  misc_feature 1..20: note = chemically synthesized
  source 1..20: mol_type = other DNA
tctggcagacctttcttgta

SEQ ID NO: 55420 - DNA, 20 bp, synthetic construct
  misc_feature 1..20: note = chemically synthesized
  source 1..20: mol_type = other DNA
gacctttcttgtaaggatct

SEQ ID NO: 55421 - DNA, 20 bp, synthetic construct
  misc_feature 1..20: note = chemically synthesized
  source 1..20: mol_type = other DNA
tcttgtaaggatcttggact

SEQ ID NO: 55422 - DNA, 20 bp, synthetic construct
  misc_feature 1..20: note = chemically synthesized
  source 1..20: mol_type = other DNA
aggatcttggacttggtcct

SEQ ID NO: 55423 - DNA, 20 bp, synthetic construct
  misc_feature 1..20: note = chemically synthesized
  source 1..20: mol_type = other DNA
ggatcttggacttggtcctt

SEQ ID NO: 55424 - DNA, 20 bp, synthetic construct
  misc_feature 1..20: note = chemically synthesized
  source 1..20: mol_type = other DNA
atcttggacttggtccttgg

SEQ ID NO: 55425 - DNA, 20 bp, synthetic construct
  misc_feature 1..20: note = chemically synthesized
  source 1..20: mol_type = other DNA
acttggtccttgggagcaaa

SEQ ID NO: 55426 - DNA, 20 bp, synthetic construct
  misc_feature 1..20: note = chemically synthesized
  source 1..20: mol_type = other DNA
ttgggagcaaatagattatc

SEQ ID NO: 55427 - DNA, 20 bp, synthetic construct
  misc_feature 1..20: note = chemically synthesized
  source 1..20: mol_type = other DNA
tgggagcaaatagattatca

SEQ ID NO: 55428 - DNA, 20 bp, synthetic construct
  misc_feature 1..20: note = chemically synthesized
  source 1..20: mol_type = other DNA
agcaaatagattatcaagga

SEQ ID NO: 55429 - DNA, 20 bp, synthetic construct
  misc_feature 1..20: note = chemically synthesized
  source 1..20: mol_type = other DNA
gcaaatagattatcaaggat

SEQ ID NO: 55430 - DNA, 20 bp, synthetic construct
  misc_feature 1..20: note = chemically synthesized
  source 1..20: mol_type = other DNA
caaatagattatcaaggatg

SEQ ID NO: 55431 - DNA, 20 bp, synthetic construct
  misc_feature 1..20: note = chemically synthesized
  source 1..20: mol_type = other DNA
tcaaggatggggctatgcct

SEQ ID NO: 55432 - DNA, 20 bp, synthetic construct
  misc_feature 1..20: note = chemically synthesized
  source 1..20: mol_type = other DNA
aggatggggctatgcctaag

SEQ ID NO: 55433 - DNA, 20 bp, synthetic construct
  misc_feature 1..20: note = chemically synthesized
  source 1..20: mol_type = other DNA
atggggctatgcctaagcag

SEQ ID NO: 55434 - DNA, 20 bp, synthetic construct
  misc_feature 1..20: note = chemically synthesized
  source 1..20: mol_type = other DNA
tggggctatgcctaagcagt

SEQ ID NO: 55435 - DNA, 20 bp, synthetic construct
  misc_feature 1..20: note = chemically synthesized
  source 1..20: mol_type = other DNA
ggggctatgcctaagcagta

SEQ ID NO: 55436 - DNA, 20 bp, synthetic construct
  misc_feature 1..20: note = chemically synthesized
  source 1..20: mol_type = other DNA
tatgcctaagcagtagggtt

SEQ ID NO: 55437 - DNA, 20 bp, synthetic construct
  misc_feature 1..20: note = chemically synthesized
  source 1..20: mol_type = other DNA
ctaagcagtagggttcagtt

SEQ ID NO: 55438 - DNA, 20 bp, synthetic construct
  misc_feature 1..20: note = chemically synthesized
  source 1..20: mol_type = other DNA
gcagtagggttcagttcaga

SEQ ID NO: 55439 - DNA, 20 bp, synthetic construct
  misc_feature 1..20: note = chemically synthesized
  source 1..20: mol_type = other DNA
agacagatcaaaaccatttc

SEQ ID NO: 55440 - DNA, 20 bp, synthetic construct
  misc_feature 1..20: note = chemically synthesized
  source 1..20: mol_type = other DNA
gatcaaaaccatttctggcc

SEQ ID NO: 55441 - DNA, 20 bp, synthetic construct
  misc_feature 1..20: note = chemically synthesized
  source 1..20: mol_type = other DNA
aaaccatttctggccaagcg

SEQ ID NO: 55442 - DNA, 20 bp, synthetic construct
  misc_feature 1..20: note = chemically synthesized
  source 1..20: mol_type = other DNA
ccatttctggccaagcgcag

SEQ ID NO: 55443 - DNA, 20 bp, synthetic construct
  misc_feature 1..20: note = chemically synthesized
  source 1..20: mol_type = other DNA
agtggctcacactgtaatcc

SEQ ID NO: 55444 - DNA, 20 bp, synthetic construct
  misc_feature 1..20: note = chemically synthesized
  source 1..20: mol_type = other DNA
acactgtaatcccagcactt

SEQ ID NO: 55445 - DNA, 20 bp, synthetic construct
  misc_feature 1..20: note = chemically synthesized
  source 1..20: mol_type = other DNA
cactgtaatcccagcacttt

SEQ ID NO: 55446 - DNA, 20 bp, synthetic construct
  misc_feature 1..20: note = chemically synthesized
  source 1..20: mol_type = other DNA
ctgtaatcccagcactttgg

SEQ ID NO: 55447 - DNA, 20 bp, synthetic construct
  misc_feature 1..20: note = chemically synthesized
  source 1..20: mol_type = other DNA
tgtaatcccagcactttggg

SEQ ID NO: 55448 - DNA, 20 bp, synthetic construct
  misc_feature 1..20: note = chemically synthesized
  source 1..20: mol_type = other DNA
tcccagcactttgggaggct

SEQ ID NO: 55449 - DNA, 20 bp, synthetic construct
  misc_feature 1..20: note = chemically synthesized
  source 1..20: mol_type = other DNA
cccagcactttgggaggctg

SEQ ID NO: 55450 - DNA, 20 bp, synthetic construct
  misc_feature 1..20: note = chemically synthesized
  source 1..20: mol_type = other DNA
agcactttgggaggctgagg

SEQ ID NO: 55451 - DNA, 20 bp, synthetic construct
  misc_feature 1..20: note = chemically synthesized
  source 1..20: mol_type = other DNA
gcactttgggaggctgaggc

SEQ ID NO: 55452 - DNA, 20 bp, synthetic construct
  misc_feature 1..20: note = chemically synthesized
  source 1..20: mol_type = other DNA
actttgggaggctgaggcag

SEQ ID NO: 55453 - DNA, 20 bp, synthetic construct
  misc_feature 1..20: note = chemically synthesized
  source 1..20: mol_type = other DNA
ctttgggaggctgaggcagg

SEQ ID NO: 55454 - DNA, 20 bp, synthetic construct
  misc_feature 1..20: note = chemically synthesized
  source 1..20: mol_type = other DNA
gcaggaggatcacttgaacc

SEQ ID NO: 55455 - DNA, 20 bp, synthetic construct
  misc_feature 1..20: note = chemically synthesized
  source 1..20: mol_type = other DNA
caggaggatcacttgaaccc

SEQ ID NO: 55456 - DNA, 20 bp, synthetic construct
  misc_feature 1..20: note = chemically synthesized
  source 1..20: mol_type = other DNA
ggaggatcacttgaacccag

SEQ ID NO: 55457 - DNA, 20 bp, synthetic construct
  misc_feature 1..20: note = chemically synthesized
  source 1..20: mol_type = other DNA
tcacttgaacccaggagttc

SEQ ID NO: 55458 - DNA, 20 bp, synthetic construct
  misc_feature 1..20: note = chemically synthesized
  source 1..20: mol_type = other DNA
tgaacccaggagttcaagac

SEQ ID NO: 55459 - DNA, 20 bp, synthetic construct
  misc_feature 1..20: note = chemically synthesized
  source 1..20: mol_type = other DNA
ccaggagttcaagaccagcc

SEQ ID NO: 55460 - DNA, 20 bp, synthetic construct
  misc_feature 1..20: note = chemically synthesized
  source 1..20: mol_type = other DNA
caggagttcaagaccagcct

SEQ ID NO: 55461 - DNA, 20 bp, synthetic construct
  misc_feature 1..20: note = chemically synthesized
  source 1..20: mol_type = other DNA
gagttcaagaccagcctggg

SEQ ID NO: 55462 - DNA, 20 bp, synthetic construct
  misc_feature 1..20: note = chemically synthesized
  source 1..20: mol_type = other DNA
caagaccagcctgggcagca

SEQ ID NO: 55463 - DNA, 20 bp, synthetic construct
  misc_feature 1..20: note = chemically synthesized
  source 1..20: mol_type = other DNA
accagcctgggcagcatagt

SEQ ID NO: 55464 - DNA, 20 bp, synthetic construct
  misc_feature 1..20: note = chemically synthesized
  source 1..20: mol_type = other DNA
tctctattaaaaaaaaaaaa

SEQ ID NO: 55465 - DNA, 20 bp, synthetic construct
  misc_feature 1..20: note = chemically synthesized
  source 1..20: mol_type = other DNA
aagactattttctttctccc

SEQ ID NO: 55466 - DNA, 20 bp, synthetic construct
  misc_feature 1..20: note = chemically synthesized
  source 1..20: mol_type = other DNA
ctattttctttctccctggt

SEQ ID NO: 55467 - DNA, 20 bp, synthetic construct
  misc_feature 1..20: note = chemically synthesized
  source 1..20: mol_type = other DNA
tattttctttctccctggtt

SEQ ID NO: 55468 - DNA, 20 bp, synthetic construct
  misc_feature 1..20: note = chemically synthesized
  source 1..20: mol_type = other DNA
ttgggaccatttgattctgt

SEQ ID NO: 55469 - DNA, 20 bp, synthetic construct
  misc_feature 1..20: note = chemically synthesized
  source 1..20: mol_type = other DNA
tgggaccatttgattctgtg

SEQ ID NO: 55470 - DNA, 20 bp, synthetic construct
  misc_feature 1..20: note = chemically synthesized
  source 1..20: mol_type = other DNA
gggaccatttgattctgtga

SEQ ID NO: 55471 - DNA, 20 bp, synthetic construct
  misc_feature 1..20: note = chemically synthesized
  source 1..20: mol_type = other DNA
ggaccatttgattctgtgag

SEQ ID NO: 55472 - DNA, 20 bp, synthetic construct
  misc_feature 1..20: note = chemically synthesized
  source 1..20: mol_type = other DNA
atttgattctgtgaggggcc

SEQ ID NO: 55473 - DNA, 20 bp, synthetic construct
  misc_feature 1..20: note = chemically synthesized
  source 1..20: mol_type = other DNA
tggttcccacaacgccctct

SEQ ID NO: 55474 - DNA, 20 bp, synthetic construct
  misc_feature 1..20: note = chemically synthesized
  source 1..20: mol_type = other DNA
gttcccacaacgccctctga

SEQ ID NO: 55475 - DNA, 20 bp, synthetic construct
  misc_feature 1..20: note = chemically synthesized
  source 1..20: mol_type = other DNA
gccctctgagagcccaaatc

SEQ ID NO: 55476 - DNA, 20 bp, synthetic construct
  misc_feature 1..20: note = chemically synthesized
  source 1..20: mol_type = other DNA
ctctgagagcccaaatccag

SEQ ID NO: 55477 - DNA, 20 bp, synthetic construct
  misc_feature 1..20: note = chemically synthesized
  source 1..20: mol_type = other DNA
tctgagagcccaaatccagt

SEQ ID NO: 55478 - DNA, 20 bp, synthetic construct
  misc_feature 1..20: note = chemically synthesized
  source 1..20: mol_type = other DNA
tgagagcccaaatccagtag

SEQ ID NO: 55479 - DNA, 20 bp, synthetic construct
  misc_feature 1..20: note = chemically synthesized
  source 1..20: mol_type = other DNA
tgcaatcttccctgaatata

SEQ ID NO: 55480 - DNA, 20 bp, synthetic construct
  misc_feature 1..20: note = chemically synthesized
  source 1..20: mol_type = other DNA
ttccctgaatatacagactc

SEQ ID NO: 55481 - DNA, 20 bp, synthetic construct
  misc_feature 1..20: note = chemically synthesized
  source 1..20: mol_type = other DNA
ccctgaatatacagactccg

SEQ ID NO: 55482 - DNA, 20 bp, synthetic construct
  misc_feature 1..20: note = chemically synthesized
  source 1..20: mol_type = other DNA
aatatacagactccggagtt

SEQ ID NO: 55483 - DNA, 20 bp, synthetic construct
  misc_feature 1..20: note = chemically synthesized
  source 1..20: mol_type = other DNA
atatacagactccggagttc

SEQ ID NO: 55484 - DNA, 20 bp, synthetic construct
  misc_feature 1..20: note = chemically synthesized
  source 1..20: mol_type = other DNA
tccggagttcaggtgtgaaa

SEQ ID NO: 55485 - DNA, 20 bp, synthetic construct
  misc_feature 1..20: note = chemically synthesized
  source 1..20: mol_type = other DNA
ggagttcaggtgtgaaatag

SEQ ID NO: 55486 - DNA, 20 bp, synthetic construct
  misc_feature 1..20: note = chemically synthesized
  source 1..20: mol_type = other DNA
agttcaggtgtgaaatagcg

SEQ ID NO: 55487 - DNA, 20 bp, synthetic construct
  misc_feature 1..20: note = chemically synthesized
  source 1..20: mol_type = other DNA
gaaatagcggagcttaccct

SEQ ID NO: 55488 - DNA, 20 bp, synthetic construct
  misc_feature 1..20: note = chemically synthesized
  source 1..20: mol_type = other DNA
aaatagcggagcttaccctc

SEQ ID NO: 55489 - DNA, 20 bp, synthetic construct
  misc_feature 1..20: note = chemically synthesized
  source 1..20: mol_type = other DNA
cctcaggaaatccattgata

SEQ ID NO: 55490 - DNA, 20 bp, synthetic construct
  misc_feature 1..20: note = chemically synthesized
  source 1..20: mol_type = other DNA
cattgatacggtgatgattt

SEQ ID NO: 55491 - DNA, 20 bp, synthetic construct
  misc_feature 1..20: note = chemically synthesized
  source 1..20: mol_type = other DNA
attgatacggtgatgatttg

SEQ ID NO: 55492 - DNA, 20 bp, synthetic construct
  misc_feature 1..20: note = chemically synthesized
  source 1..20: mol_type = other DNA
cggtgatgatttgaggcctt

SEQ ID NO: 55493 - DNA, 20 bp, synthetic construct
  misc_feature 1..20: note = chemically synthesized
  source 1..20: mol_type = other DNA
gtgatgatttgaggcctttg

SEQ ID NO: 55494 - DNA, 20 bp, synthetic construct
  misc_feature 1..20: note = chemically synthesized
  source 1..20: mol_type = other DNA
tgatgatttgaggcctttgg

SEQ ID NO: 55495 - DNA, 20 bp, synthetic construct
  misc_feature 1..20: note = chemically synthesized
  source 1..20: mol_type = other DNA
tggaggtcgaaccctgcacc

SEQ ID NO: 55496 - DNA, 20 bp, synthetic construct
  misc_feature 1..20: note = chemically synthesized
  source 1..20: mol_type = other DNA
ggaggtcgaaccctgcaccc

SEQ ID NO: 55497 - DNA, 20 bp, synthetic construct
  misc_feature 1..20: note = chemically synthesized
  source 1..20: mol_type = other DNA
ccaggatgaaataaatctct

SEQ ID NO: 55498 - DNA, 20 bp, synthetic construct
  misc_feature 1..20: note = chemically synthesized
  source 1..20: mol_type = other DNA
ggatgaaataaatctcttag

SEQ ID NO: 55499 - DNA, 20 bp, synthetic construct
  misc_feature 1..20: note = chemically synthesized
  source 1..20: mol_type = other DNA
atgaaataaatctcttagca

SEQ ID NO: 55500 - DNA, 20 bp, synthetic construct
  misc_feature 1..20: note = chemically synthesized
  source 1..20: mol_type = other DNA
cttagcagagaaacctgcaa

SEQ ID NO: 55501 - DNA, 20 bp, synthetic construct
  misc_feature 1..20: note = chemically synthesized
  source 1..20: mol_type = other DNA
aaacctgcaatagctccctt

SEQ ID NO: 55502 - DNA, 20 bp, synthetic construct
  misc_feature 1..20: note = chemically synthesized
  source 1..20: mol_type = other DNA
tagctcccttgagcattcct

SEQ ID NO: 55503 - DNA, 20 bp, synthetic construct
  misc_feature 1..20: note = chemically synthesized
  source 1..20: mol_type = other DNA
gcattccttggtgctgtgac

SEQ ID NO: 55504 - DNA, 20 bp, synthetic construct
  misc_feature 1..20: note = chemically synthesized
  source 1..20: mol_type = other DNA
gtgctgtgactggctctgtt

SEQ ID NO: 55505 - DNA, 20 bp, synthetic construct
  misc_feature 1..20: note = chemically synthesized
  source 1..20: mol_type = other DNA
cccaaaaccttgctgacact

SEQ ID NO: 55506 - DNA, 20 bp, synthetic construct
  misc_feature 1..20: note = chemically synthesized
  source 1..20: mol_type = other DNA
ccttgctgacactgagttac

SEQ ID NO: 55507 - DNA, 20 bp, synthetic construct
  misc_feature 1..20: note = chemically synthesized
  source 1..20: mol_type = other DNA
gacactgagttactggattc

SEQ ID NO: 55508 - DNA, 20 bp, synthetic construct
  misc_feature 1..20: note = chemically synthesized
  source 1..20: mol_type = other DNA
cactgagttactggattcca

SEQ ID NO: 55509 - DNA, 20 bp, synthetic construct
  misc_feature 1..20: note = chemically synthesized
  source 1..20: mol_type = other DNA
gagttactggattccagagc

SEQ ID NO: 55510 - DNA, 20 bp, synthetic construct
  misc_feature 1..20: note = chemically synthesized
  source 1..20: mol_type = other DNA
actggattccagagctggcc

SEQ ID NO: 55511 - DNA, 20 bp, synthetic construct
  misc_feature 1..20: note = chemically synthesized
  source 1..20: mol_type = other DNA
gccctgattgcttaatttga

SEQ ID NO: 55512 - DNA, 20 bp, synthetic construct
  misc_feature 1..20: note = chemically synthesized
  source 1..20: mol_type = other DNA
gaccctgcccatctactctc

SEQ ID NO: 55513 - DNA, 20 bp, synthetic construct
  misc_feature 1..20: note = chemically synthesized
  source 1..20: mol_type = other DNA
caagttgcaatttgatgcca

SEQ ID NO: 55514 - DNA, 20 bp, synthetic construct
  misc_feature 1..20: note = chemically synthesized
  source 1..20: mol_type = other DNA
agttgcaatttgatgccata

SEQ ID NO: 55515 - DNA, 20 bp, synthetic construct
  misc_feature 1..20: note = chemically synthesized
  source 1..20: mol_type = other DNA
gagcaactcatgctgacttg

SEQ ID NO: 55516 - DNA, 20 bp, synthetic construct
  misc_feature 1..20: note = chemically synthesized
  source 1..20: mol_type = other DNA
actcatgctgacttgtggtc

SEQ ID NO: 55517 - DNA, 20 bp, synthetic construct
  misc_feature 1..20: note = chemically synthesized
  source 1..20: mol_type = other DNA
catgctgacttgtggtctgg

SEQ ID NO: 55518 - DNA, 20 bp, synthetic construct
  misc_feature 1..20: note = chemically synthesized
  source 1..20: mol_type = other DNA
tggtagccaatgttcattct

SEQ ID NO: 55519 - DNA, 20 bp, synthetic construct
  misc_feature 1..20: note = chemically synthesized
  source 1..20: mol_type = other DNA
tggccaactctgaatctttc

SEQ ID NO: 55520 - DNA, 20 bp, synthetic construct
  misc_feature 1..20: note = chemically synthesized
  source 1..20: mol_type = other DNA
ttctggttctatgctgattt

SEQ ID NO: 55521 - DNA, 20 bp, synthetic construct
  misc_feature 1..20: note = chemically synthesized
  source 1..20: mol_type = other DNA
tctggttctatgctgatttt

SEQ ID NO: 55522 - DNA, 20 bp, synthetic construct
  misc_feature 1..20: note = chemically synthesized
  source 1..20: mol_type = other DNA
caactctgcctgtgcccctg

SEQ ID NO: 55523 - DNA, 20 bp, synthetic construct
  misc_feature 1..20: note = chemically synthesized
  source 1..20: mol_type = other DNA
gtgcccctgtggatgcattt

SEQ ID NO: 55524 - DNA, 20 bp, synthetic construct
  misc_feature 1..20: note = chemically synthesized
  source 1..20: mol_type = other DNA
ttaagtctccctatccctaa

SEQ ID NO: 55525 - DNA, 20 bp, synthetic construct
  misc_feature 1..20: note = chemically synthesized
  source 1..20: mol_type = other DNA
taagtctccctatccctaat

SEQ ID NO: 55526 - DNA, 20 bp, synthetic construct
  misc_feature 1..20: note = chemically synthesized
  source 1..20: mol_type = other DNA
cctatccctaatgggactct

SEQ ID NO: 55527 - DNA, 20 bp, synthetic construct
  misc_feature 1..20: note = chemically synthesized
  source 1..20: mol_type = other DNA
atgggactctcggtcaactc

SEQ ID NO: 55528 - DNA, 20 bp, synthetic construct
  misc_feature 1..20: note = chemically synthesized
  source 1..20: mol_type = other DNA
gggactctcggtcaactcaa

SEQ ID NO: 55529 - DNA, 20 bp, synthetic construct
  misc_feature 1..20: note = chemically synthesized
  source 1..20: mol_type = other DNA
gactctcggtcaactcaaga

SEQ ID NO: 55530 - DNA, 20 bp, synthetic construct
  misc_feature 1..20: note = chemically synthesized
  source 1..20: mol_type = other DNA
ctctcggtcaactcaagaga

SEQ ID NO: 55531 - DNA, 20 bp, synthetic construct
  misc_feature 1..20: note = chemically synthesized
  source 1..20: mol_type = other DNA
gagagcacttttcttctcca

SEQ ID NO: 55532 - DNA, 20 bp, synthetic construct
  misc_feature 1..20: note = chemically synthesized
  source 1..20: mol_type = other DNA
agagcacttttcttctccaa

SEQ ID NO: 55533 - DNA, 20 bp, synthetic construct
  misc_feature 1..20: note = chemically synthesized
  source 1..20: mol_type = other DNA
gagcacttttcttctccaaa

SEQ ID NO: 55534 - DNA, 20 bp, synthetic construct
  misc_feature 1..20: note = chemically synthesized
  source 1..20: mol_type = other DNA
tcttctccaaagggaaaatg

SEQ ID NO: 55535 - DNA, 20 bp, synthetic construct
  misc_feature 1..20: note = chemically synthesized
  source 1..20: mol_type = other DNA
cttctccaaagggaaaatgc

SEQ ID NO: 55536 - DNA, 20 bp, synthetic construct
  misc_feature 1..20: note = chemically synthesized
  source 1..20: mol_type = other DNA
ccaaagggaaaatgcaggca

SEQ ID NO: 55537 - DNA, 20 bp, synthetic construct
  misc_feature 1..20: note = chemically synthesized
  source 1..20: mol_type = other DNA
aaagggaaaatgcaggcaca

SEQ ID NO: 55538 - DNA, 20 bp, synthetic construct
  misc_feature 1..20: note = chemically synthesized
  source 1..20: mol_type = other DNA
gagaaaccaaattatttgtt

SEQ ID NO: 55539 - DNA, 20 bp, synthetic construct
  misc_feature 1..20: note = chemically synthesized
  source 1..20: mol_type = other DNA
agaaaccaaattatttgttt

SEQ ID NO: 55540 - DNA, 20 bp, synthetic construct
  misc_feature 1..20: note = chemically synthesized
  source 1..20: mol_type = other DNA
gaaaccaaattatttgttta

SEQ ID NO: 55541 - DNA, 20 bp, synthetic construct
  misc_feature 1..20: note = chemically synthesized
  source 1..20: mol_type = other DNA
aaattatttgtttagggaaa

SEQ ID NO: 55542 - DNA, 20 bp, synthetic construct
  misc_feature 1..20: note = chemically synthesized
  source 1..20: mol_type = other DNA
attatttgtttagggaaaca

SEQ ID NO: 55543 - DNA, 20 bp, synthetic construct
  misc_feature 1..20: note = chemically synthesized
  source 1..20: mol_type = other DNA
tttgtttagggaaacagagc

SEQ ID NO: 55544 - DNA, 20 bp, synthetic construct
  misc_feature 1..20: note = chemically synthesized
  source 1..20: mol_type = other DNA
gggaaacagagctagaaatt

SEQ ID NO: 55545 - DNA, 20 bp, synthetic construct
  misc_feature 1..20: note = chemically synthesized
  source 1..20: mol_type = other DNA
aacagagctagaaatttagt

SEQ ID NO: 55546 - DNA, 20 bp, synthetic construct
  misc_feature 1..20: note = chemically synthesized
  source 1..20: mol_type = other DNA
acagagctagaaatttagtt

SEQ ID NO: 55547 - DNA, 20 bp, synthetic construct
  misc_feature 1..20: note = chemically synthesized
  source 1..20: mol_type = other DNA
agctagaaatttagttgggc

SEQ ID NO: 55548 - DNA, 20 bp, synthetic construct
  misc_feature 1..20: note = chemically synthesized
  source 1..20: mol_type = other DNA
aaatttagttgggccagaat

SEQ ID NO: 55549 - DNA, 20 bp, synthetic construct
  misc_feature 1..20: note = chemically synthesized
  source 1..20: mol_type = other DNA
tgggccagaattagaaactt

SEQ ID NO: 55550 - DNA, 20 bp, synthetic construct
  misc_feature 1..20: note = chemically synthesized
  source 1..20: mol_type = other DNA
atcacattgcatctaaaata

SEQ ID NO: 55551 - DNA, 20 bp, synthetic construct
  misc_feature 1..20: note = chemically synthesized
  source 1..20: mol_type = other DNA
tctaaaatatagtaattaac

SEQ ID NO: 55552 - DNA, 20 bp, synthetic construct
  misc_feature 1..20: note = chemically synthesized
  source 1..20: mol_type = other DNA
catatatatttttcttttca

SEQ ID NO: 55553 - DNA, 20 bp, synthetic construct
  misc_feature 1..20: note = chemically synthesized
  source 1..20: mol_type = other DNA
tttcttttcaaagatgttat

SEQ ID NO: 55554 - DNA, 20 bp, synthetic construct
  misc_feature 1..20: note = chemically synthesized
  source 1..20: mol_type = other DNA
cttttcaaagatgttatgag

SEQ ID NO: 55555 - DNA, 20 bp, synthetic construct
  misc_feature 1..20: note = chemically synthesized
  source 1..20: mol_type = other DNA
ttttcaaagatgttatgagc

SEQ ID NO: 55556 - DNA, 20 bp, synthetic construct
  misc_feature 1..20: note = chemically synthesized
  source 1..20: mol_type = other DNA
caaagatgttatgagcagga

SEQ ID NO: 55557 - DNA, 20 bp, synthetic construct
  misc_feature 1..20: note = chemically synthesized
  source 1..20: mol_type = other DNA
ttgttttgaatgataatgta

SEQ ID NO: 55558 - DNA, 20 bp, synthetic construct
  misc_feature 1..20: note = chemically synthesized
  source 1..20: mol_type = other DNA
tgtatggtatactatataat

SEQ ID NO: 55559 - DNA, 20 bp, synthetic construct
  misc_feature 1..20: note = chemically synthesized
  source 1..20: mol_type = other DNA
atggtatactatataattag

SEQ ID NO: 55560 - DNA, 20 bp, synthetic construct
  misc_feature 1..20: note = chemically synthesized
  source 1..20: mol_type = other DNA
atataattagtagcaaaaac

SEQ ID NO: 55561 - DNA, 20 bp, synthetic construct
  misc_feature 1..20: note = chemically synthesized
  source 1..20: mol_type = other DNA
tataattagtagcaaaaaca

SEQ ID NO: 55562 - DNA, 20 bp, synthetic construct
  misc_feature 1..20: note = chemically synthesized
  source 1..20: mol_type = other DNA
aacaaggactttcaaataaa

SEQ ID NO: 55563 - DNA, 20 bp, synthetic construct
  misc_feature 1..20: note = chemically synthesized
  source 1..20: mol_type = other DNA
acaaggactttcaaataaat

SEQ ID NO: 55564 - DNA, 20 bp, synthetic construct
  misc_feature 1..20: note = chemically synthesized
  source 1..20: mol_type = other DNA
actttcaaataaataggctt

SEQ ID NO: 55565 - DNA, 20 bp, synthetic construct
  misc_feature 1..20: note = chemically synthesized
  source 1..20: mol_type = other DNA
aaataggcttcagctttttt

SEQ ID NO: 55566 - DNA, 20 bp, synthetic construct
  misc_feature 1..20: note = chemically synthesized
  source 1..20: mol_type = other DNA
aataggcttcagcttttttt

SEQ ID NO: 55567 - DNA, 20 bp, synthetic construct
  misc_feature 1..20: note = chemically synthesized
  source 1..20: mol_type = other DNA
ataggcttcagctttttttg

SEQ ID NO: 55568 - DNA, 20 bp, synthetic construct
  misc_feature 1..20: note = chemically synthesized
  source 1..20: mol_type = other DNA
taggcttcagctttttttgg

SEQ ID NO: 55569 - DNA, 20 bp, synthetic construct
  misc_feature 1..20: note = chemically synthesized
  source 1..20: mol_type = other DNA
aggcttcagctttttttggg

SEQ ID NO: 55570 - DNA, 20 bp, synthetic construct
  misc_feature 1..20: note = chemically synthesized
  source 1..20: mol_type = other DNA
cttcagctttttttgggggg

SEQ ID NO: 55571 - DNA, 20 bp, synthetic construct
  misc_feature 1..20: note = chemically synthesized
  source 1..20: mol_type = other DNA
ttcagctttttttggggggt

SEQ ID NO: 55572 - DNA, 20 bp, synthetic construct
  misc_feature 1..20: note = chemically synthesized
  source 1..20: mol_type = other DNA
agctttttttggggggtagg

SEQ ID NO: 55573 - DNA, 20 bp, synthetic construct
  misc_feature 1..20: note = chemically synthesized
  source 1..20: mol_type = other DNA
gctttttttggggggtaggt

SEQ ID NO: 55574 - DNA, 20 bp, synthetic construct
  misc_feature 1..20: note = chemically synthesized
  source 1..20: mol_type = other DNA
ttttttggggggtaggtggg

SEQ ID NO: 55575 - DNA, 20 bp, synthetic construct
  misc_feature 1..20: note = chemically synthesized
  source 1..20: mol_type = other DNA
tttttggggggtaggtgggt

SEQ ID NO: 55576 - DNA, 20 bp, synthetic construct
  misc_feature 1..20: note = chemically synthesized
  source 1..20: mol_type = other DNA
ttttggggggtaggtgggtg

SEQ ID NO: 55577 - DNA, 20 bp, synthetic construct
  misc_feature 1..20: note = chemically synthesized
  source 1..20: mol_type = other DNA
tggggggtaggtgggtgggg

SEQ ID NO: 55578 - DNA, 20 bp, synthetic construct
  misc_feature 1..20: note = chemically synthesized
  source 1..20: mol_type = other DNA
ggcagaaatactctgcatat

SEQ ID NO: 55579 - DNA, 20 bp, synthetic construct
  misc_feature 1..20: note = chemically synthesized
  source 1..20: mol_type = other DNA
aaatactctgcatatcagat

SEQ ID NO: 55580 - DNA, 20 bp, synthetic construct
  misc_feature 1..20: note = chemically synthesized
  source 1..20: mol_type = other DNA
tatcagatgagattgaaaaa

SEQ ID NO: 55581 - DNA, 20 bp, synthetic construct
  misc_feature 1..20: note = chemically synthesized
  source 1..20: mol_type = other DNA
atcagatgagattgaaaaac

SEQ ID NO: 55582 - DNA, 20 bp, synthetic construct
  misc_feature 1..20: note = chemically synthesized
  source 1..20: mol_type = other DNA
gatgagattgaaaaacaggc

SEQ ID NO: 55583 - DNA, 20 bp, synthetic construct
  misc_feature 1..20: note = chemically synthesized
  source 1..20: mol_type = other DNA
atgagattgaaaaacaggca

SEQ ID NO: 55584 - DNA, 20 bp, synthetic construct
  misc_feature 1..20: note = chemically synthesized
  source 1..20: mol_type = other DNA
gagattgaaaaacaggcaag

SEQ ID NO: 55585 - DNA, 20 bp, synthetic construct
  misc_feature 1..20: note = chemically synthesized
  source 1..20: mol_type = other DNA
agattgaaaaacaggcaagg

SEQ ID NO: 55586 - DNA, 20 bp, synthetic construct
  misc_feature 1..20: note = chemically synthesized
  source 1..20: mol_type = other DNA
gattgaaaaacaggcaagga

SEQ ID NO: 55587 - DNA, 20 bp, synthetic construct
  misc_feature 1..20: note = chemically synthesized
  source 1..20: mol_type = other DNA
aaaaacaggcaaggagggcc

SEQ ID NO: 55588 - DNA, 20 bp, synthetic construct
  misc_feature 1..20: note = chemically synthesized
  source 1..20: mol_type = other DNA
caggcaaggagggcccggtg

SEQ ID NO: 55589 - DNA, 20 bp, synthetic construct
  misc_feature 1..20: note = chemically synthesized
  source 1..20: mol_type = other DNA
gcaaggagggcccggtgcgg

SEQ ID NO: 55590 - DNA, 20 bp, synthetic construct
  misc_feature 1..20: note = chemically synthesized
  source 1..20: mol_type = other DNA
gtggctcatgcctgtaatcc

SEQ ID NO: 55591 - DNA, 20 bp, synthetic construct
  misc_feature 1..20: note = chemically synthesized
  source 1..20: mol_type = other DNA
tgcctgtaatcctagcacct

SEQ ID NO: 55592 - DNA, 20 bp, synthetic construct
  misc_feature 1..20: note = chemically synthesized
  source 1..20: mol_type = other DNA
gcctgtaatcctagcacctt

SEQ ID NO: 55593 - DNA, 20 bp, synthetic construct
  misc_feature 1..20: note = chemically synthesized
  source 1..20: mol_type = other DNA
ctgtaatcctagcaccttgg

SEQ ID NO: 55594 - DNA, 20 bp, synthetic construct
  misc_feature 1..20: note = chemically synthesized
  source 1..20: mol_type = other DNA
tgtaatcctagcaccttggg

SEQ ID NO: 55595 - DNA, 20 bp, synthetic construct
  misc_feature 1..20: note = chemically synthesized
  source 1..20: mol_type = other DNA
tcctagcaccttgggaggcc

SEQ ID NO: 55596 - DNA, 20 bp, synthetic construct
  misc_feature 1..20: note = chemically synthesized
  source 1..20: mol_type = other DNA
cctagcaccttgggaggcca

SEQ ID NO: 55597 - DNA, 20 bp, synthetic construct
  misc_feature 1..20: note = chemically synthesized
  source 1..20: mol_type = other DNA
agcaccttgggaggccaagg

SEQ ID NO: 55598 - DNA, 20 bp, synthetic construct
  misc_feature 1..20: note = chemically synthesized
  source 1..20: mol_type = other DNA
gcaccttgggaggccaaggc

SEQ ID NO: 55599 - DNA, 20 bp, synthetic construct
  misc_feature 1..20: note = chemically synthesized
  source 1..20: mol_type = other DNA
ccttgggaggccaaggcagg

SEQ ID NO: 55600 - DNA, 20 bp, synthetic construct
  misc_feature 1..20: note = chemically synthesized
  source 1..20: mol_type = other DNA
ccaaggcaggtggatcactt

SEQ ID NO: 55601 - DNA, 20 bp, synthetic construct
  misc_feature 1..20: note = chemically synthesized
  source 1..20: mol_type = other DNA
caaggcaggtggatcacttg

SEQ ID NO: 55602 - DNA, 20 bp, synthetic construct
  misc_feature 1..20: note = chemically synthesized
  source 1..20: mol_type = other DNA
gcaggtggatcacttgaggt

SEQ ID NO: 55603 - DNA, 20 bp, synthetic construct
  misc_feature 1..20: note = chemically synthesized
  source 1..20: mol_type = other DNA
caggtggatcacttgaggtc

SEQ ID NO: 55604 - DNA, 20 bp, synthetic construct
  misc_feature 1..20: note = chemically synthesized
  source 1..20: mol_type = other DNA
ggtggatcacttgaggtcag

SEQ ID NO: 55605 - DNA, 20 bp, synthetic construct
  misc_feature 1..20: note = chemically synthesized
  source 1..20: mol_type = other DNA
tcacttgaggtcaggagttc

SEQ ID NO: 55606 - DNA, 20 bp, synthetic construct
  misc_feature 1..20: note = chemically synthesized
  source 1..20: mol_type = other DNA
tgaggtcaggagttcgagac

SEQ ID NO: 55607 - DNA, 20 bp, synthetic construct
  misc_feature 1..20: note = chemically synthesized
  source 1..20: mol_type = other DNA
tcaggagttcgagaccagcc

SEQ ID NO: 55608 - DNA, 20 bp, synthetic construct
  misc_feature 1..20: note = chemically synthesized
  source 1..20: mol_type = other DNA
aattctaaaaatataaaaat

SEQ ID NO: 55609 - DNA, 20 bp, synthetic construct
  misc_feature 1..20: note = chemically synthesized
  source 1..20: mol_type = other DNA
taaaaatataaaaattagcc

SEQ ID NO: 55610 - DNA, 20 bp, synthetic construct
  misc_feature 1..20: note = chemically synthesized
  source 1..20: mol_type = other DNA
atataaaaattagcctggca

SEQ ID NO: 55611 - DNA, 20 bp, synthetic construct
  misc_feature 1..20: note = chemically synthesized
  source 1..20: mol_type = other DNA
taaaaattagcctggcatgg

SEQ ID NO: 55612 - DNA, 20 bp, synthetic construct
  misc_feature 1..20: note = chemically synthesized
  source 1..20: mol_type = other DNA
cctggcatggtggtgcacgc

SEQ ID NO: 55613 - DNA, 20 bp, synthetic construct
  misc_feature 1..20: note = chemically synthesized
  source 1..20: mol_type = other DNA
ggcatggtggtgcacgccgg

SEQ ID NO: 55614 - DNA, 20 bp, synthetic construct
  misc_feature 1..20: note = chemically synthesized
  source 1..20: mol_type = other DNA
gtggtgcacgccggtagtcc

SEQ ID NO: 55615 - DNA, 20 bp, synthetic construct
  misc_feature 1..20: note = chemically synthesized
  source 1..20: mol_type = other DNA
cgccggtagtcctagctact

SEQ ID NO: 55616 - DNA, 20 bp, synthetic construct
  misc_feature 1..20: note = chemically synthesized
  source 1..20: mol_type = other DNA
gccggtagtcctagctactg

SEQ ID NO: 55617 - DNA, 20 bp, synthetic construct
  misc_feature 1..20: note = chemically synthesized
  source 1..20: mol_type = other DNA
cggtagtcctagctactgag

SEQ ID NO: 55618 - DNA, 20 bp, synthetic construct
  misc_feature 1..20: note = chemically synthesized
  source 1..20: mol_type = other DNA
ggtagtcctagctactgagg

SEQ ID NO: 55619 - DNA, 20 bp, synthetic construct
  misc_feature 1..20: note = chemically synthesized
  source 1..20: mol_type = other DNA
tcctagctactgaggaggct

SEQ ID NO: 55620 - DNA, 20 bp, synthetic construct
  misc_feature 1..20: note = chemically synthesized
  source 1..20: mol_type = other DNA
tactgaggaggctgagacat

SEQ ID NO: 55621 - DNA, 20 bp, synthetic construct
  misc_feature 1..20: note = chemically synthesized
  source 1..20: mol_type = other DNA
gacatgagaatcgcttgaac

SEQ ID NO: 55622 - DNA, 20 bp, synthetic construct
  misc_feature 1..20: note = chemically synthesized
  source 1..20: mol_type = other DNA
acatgagaatcgcttgaacc

SEQ ID NO: 55623 - DNA, 20 bp, synthetic construct
  misc_feature 1..20: note = chemically synthesized
  source 1..20: mol_type = other DNA
atgagaatcgcttgaaccag

SEQ ID NO: 55624 - DNA, 20 bp, synthetic construct
  misc_feature 1..20: note = chemically synthesized
  source 1..20: mol_type = other DNA
tgagaatcgcttgaaccagg

SEQ ID NO: 55625 - DNA, 20 bp, synthetic construct
  misc_feature 1..20: note = chemically synthesized
  source 1..20: mol_type = other DNA
gaatcgcttgaaccaggagg

SEQ ID NO: 55626 - DNA, 20 bp, synthetic construct
  misc_feature 1..20: note = chemically synthesized
  source 1..20: mol_type = other DNA
atcgcttgaaccaggaggaa

SEQ ID NO: 55627 - DNA, 20 bp, synthetic construct
  misc_feature 1..20: note = chemically synthesized
  source 1..20: mol_type = other DNA
tcgcttgaaccaggaggaag

SEQ ID NO: 55628 - DNA, 20 bp, synthetic construct
  misc_feature 1..20: note = chemically synthesized
  source 1..20: mol_type = other DNA
gaaccaggaggaagaggttg

SEQ ID NO: 55629 - DNA, 20 bp, synthetic construct
  misc_feature 1..20: note = chemically synthesized
  source 1..20: mol_type = other DNA
caggaggaagaggttgcagt

SEQ ID NO: 55630 - DNA, 20 bp, synthetic construct
  misc_feature 1..20: note = chemically synthesized
  source 1..20: mol_type = other DNA
ggaagaggttgcagtgagcc

SEQ ID NO: 55631 - DNA, 20 bp, synthetic construct
  misc_feature 1..20: note = chemically synthesized
  source 1..20: mol_type = other DNA
aagatcgtgccactccactc

SEQ ID NO: 55632 - DNA, 20 bp, synthetic construct
  misc_feature 1..20: note = chemically synthesized
  source 1..20: mol_type = other DNA
cgtgccactccactccagcc

SEQ ID NO: 55633 - DNA, 20 bp, synthetic construct
  misc_feature 1..20: note = chemically synthesized
  source 1..20: mol_type = other DNA
gtgccactccactccagcct

SEQ ID NO: 55634 - DNA, 20 bp, synthetic construct
  misc_feature 1..20: note = chemically synthesized
  source 1..20: mol_type = other DNA
ctccactccagcctgggtga

SEQ ID NO: 55635 - DNA, 20 bp, synthetic construct
  misc_feature 1..20: note = chemically synthesized
  source 1..20: mol_type = other DNA
tccactccagcctgggtgat

SEQ ID NO: 55636 - DNA, 20 bp, synthetic construct
  misc_feature 1..20: note = chemically synthesized
  source 1..20: mol_type = other DNA
taggtgcgccgtctcaaaaa

SEQ ID NO: 55637 - DNA, 20 bp, synthetic construct
  misc_feature 1..20: note = chemically synthesized
  source 1..20: mol_type = other DNA
gtctcaaaaaaagaaaaaaa

SEQ ID NO: 55638 - DNA, 20 bp, synthetic construct
  misc_feature 1..20: note = chemically synthesized
  source 1..20: mol_type = other DNA
aaaaaaagaaaaaaaaagaa

SEQ ID NO: 55639 - DNA, 20 bp, synthetic construct
  misc_feature 1..20: note = chemically synthesized
  source 1..20: mol_type = other DNA
aaaagaaaaaaaaagaaaag

SEQ ID NO: 55640 - DNA, 20 bp, synthetic construct
  misc_feature 1..20: note = chemically synthesized
  source 1..20: mol_type = other DNA
aaagaaaaaaaaagaaaagc

SEQ ID NO: 55641 - DNA, 20 bp, synthetic construct
  misc_feature 1..20: note = chemically synthesized
  source 1..20: mol_type = other DNA
aaaaaaaaagaaaagcaggc

SEQ ID NO: 55642 - DNA, 20 bp, synthetic construct
  misc_feature 1..20: note = chemically synthesized
  source 1..20: mol_type = other DNA
aaaaaaaagaaaagcaggca

SEQ ID NO: 55643 - DNA, 20 bp, synthetic construct
  misc_feature 1..20: note = chemically synthesized
  source 1..20: mol_type = other DNA
aaaaaagaaaagcaggcaag

SEQ ID NO: 55644 - DNA, 20 bp, synthetic construct
  misc_feature 1..20: note = chemically synthesized
  source 1..20: mol_type = other DNA
aaaaagaaaagcaggcaagg

SEQ ID NO: 55645 - DNA, 20 bp, synthetic construct
  misc_feature 1..20: note = chemically synthesized
  source 1..20: mol_type = other DNA
aaagaaaagcaggcaaggag

SEQ ID NO: 55646 - DNA, 20 bp, synthetic construct
  misc_feature 1..20: note = chemically synthesized
  source 1..20: mol_type = other DNA
aaaagcaggcaaggaggagt

SEQ ID NO: 55647 - DNA, 20 bp, synthetic construct
  misc_feature 1..20: note = chemically synthesized
  source 1..20: mol_type = other DNA
gcaggcaaggaggagttggc

SEQ ID NO: 55648 - DNA, 20 bp, synthetic construct
  misc_feature 1..20: note = chemically synthesized
  source 1..20: mol_type = other DNA
gcaaggaggagttggctagc

SEQ ID NO: 55649 - DNA, 20 bp, synthetic construct
  misc_feature 1..20: note = chemically synthesized
  source 1..20: mol_type = other DNA
aggagttggctagctggaca

SEQ ID NO: 55650 - DNA, 20 bp, synthetic construct
  misc_feature 1..20: note = chemically synthesized
  source 1..20: mol_type = other DNA
agttggctagctggacatag

SEQ ID NO: 55651 - DNA, 20 bp, synthetic construct
  misc_feature 1..20: note = chemically synthesized
  source 1..20: mol_type = other DNA
gacatagtggcttgcacctg

SEQ ID NO: 55652 - DNA, 20 bp, synthetic construct
  misc_feature 1..20: note = chemically synthesized
  source 1..20: mol_type = other DNA
gtggcttgcacctgtagtcc

SEQ ID NO: 55653 - DNA, 20 bp, synthetic construct
  misc_feature 1..20: note = chemically synthesized
  source 1..20: mol_type = other DNA
cacctgtagtcccagctacg

SEQ ID NO: 55654 - DNA, 20 bp, synthetic construct
  misc_feature 1..20: note = chemically synthesized
  source 1..20: mol_type = other DNA
acctgtagtcccagctacgc

SEQ ID NO: 55655 - DNA, 20 bp, synthetic construct
  misc_feature 1..20: note = chemically synthesized
  source 1..20: mol_type = other DNA
cccagctacgcgggacgctg

SEQ ID NO: 55656 - DNA, 20 bp, synthetic construct
  misc_feature 1..20: note = chemically synthesized
  source 1..20: mol_type = other DNA
agctacgcgggacgctgtgg

SEQ ID NO: 55657 - DNA, 20 bp, synthetic construct
  misc_feature 1..20: note = chemically synthesized
  source 1..20: mol_type = other DNA
gctacgcgggacgctgtggt

SEQ ID NO: 55658 - DNA, 20 bp, synthetic construct
  misc_feature 1..20: note = chemically synthesized
  source 1..20: mol_type = other DNA
ctacgcgggacgctgtggta

SEQ ID NO: 55659 - DNA, 20 bp, synthetic construct
  misc_feature 1..20: note = chemically synthesized
  source 1..20: mol_type = other DNA
cgcgggacgctgtggtaggg

SEQ ID NO: 55660 - DNA, 20 bp, synthetic construct
  misc_feature 1..20: note = chemically synthesized
  source 1..20: mol_type = other DNA
gcgggacgctgtggtagggt

SEQ ID NO: 55661 - DNA, 20 bp, synthetic construct
  misc_feature 1..20: note = chemically synthesized
  source 1..20: mol_type = other DNA
gggacgctgtggtagggtgg

SEQ ID NO: 55662 - DNA, 20 bp, synthetic construct
  misc_feature 1..20: note = chemically synthesized
  source 1..20: mol_type = other DNA
ggacgctgtggtagggtggg

SEQ ID NO: 55663 - DNA, 20 bp, synthetic construct
  misc_feature 1..20: note = chemically synthesized
  source 1..20: mol_type = other DNA
gtagggtgggaggactgctt

SEQ ID NO: 55664 - DNA, 20 bp, synthetic construct
  misc_feature 1..20: note = chemically synthesized
  source 1..20: mol_type = other DNA
gtgggaggactgcttgagcc

SEQ ID NO: 55665 - DNA, 20 bp, synthetic construct
  misc_feature 1..20: note = chemically synthesized
  source 1..20: mol_type = other DNA
tgggaggactgcttgagccc

SEQ ID NO: 55666 - DNA, 20 bp, synthetic construct
  misc_feature 1..20: note = chemically synthesized
  source 1..20: mol_type = other DNA
ctgcttgagcccaggaattc

SEQ ID NO: 55667 - DNA, 20 bp, synthetic construct
  misc_feature 1..20: note = chemically synthesized
  source 1..20: mol_type = other DNA
gcttgagcccaggaattcaa

SEQ ID NO: 55668 - DNA, 20 bp, synthetic construct
  misc_feature 1..20: note = chemically synthesized
  source 1..20: mol_type = other DNA
tgagcccaggaattcaagag

SEQ ID NO: 55669 - DNA, 20 bp, synthetic construct
  misc_feature 1..20: note = chemically synthesized
  source 1..20: mol_type = other DNA
ccaggaattcaagagcagcc

SEQ ID NO: 55670 - DNA, 20 bp, synthetic construct
  misc_feature 1..20: note = chemically synthesized
  source 1..20: mol_type = other DNA
caggaattcaagagcagcct

SEQ ID NO: 55671 - DNA, 20 bp, synthetic construct
  misc_feature 1..20: note = chemically synthesized
  source 1..20: mol_type = other DNA
caagagcagcctgggcaaca

SEQ ID NO: 55672 - DNA, 20 bp, synthetic construct
  misc_feature 1..20: note = chemically synthesized
  source 1..20: mol_type = other DNA
agcagcctgggcaacatagt

SEQ ID NO: 55673 - DNA, 20 bp, synthetic construct
  misc_feature 1..20: note = chemically synthesized
  source 1..20: mol_type = other DNA
ctgtctcaaaaaaaaaaaaa

SEQ ID NO: 55674 - DNA, 20 bp, synthetic construct
  misc_feature 1..20: note = chemically synthesized
  source 1..20: mol_type = other DNA
gtctcaaaaaaaaaaaaaaa

SEQ ID NO: 55675 - DNA, 20 bp, synthetic construct
  misc_feature 1..20: note = chemically synthesized
  source 1..20: mol_type = other DNA
ctcaaaaaaaaaaaaaaaga

SEQ ID NO: 55676 - DNA, 20 bp, synthetic construct
  misc_feature 1..20: note = chemically synthesized
  source 1..20: mol_type = other DNA
aaaaaaaaaaaaaaagagag

SEQ ID NO: 55677 - DNA, 20 bp, synthetic construct
  misc_feature 1..20: note = chemically synthesized
  source 1..20: mol_type = other DNA
aagatgttgacttttccttt

SEQ ID NO: 55678 - DNA, 20 bp, synthetic construct
  misc_feature 1..20: note = chemically synthesized
  source 1..20: mol_type = other DNA
ttcctttaagaatgtgctct

SEQ ID NO: 55679 - DNA, 20 bp, synthetic construct
  misc_feature 1..20: note = chemically synthesized
  source 1..20: mol_type = other DNA
tttaagaatgtgctcttggt

SEQ ID NO: 55680 - DNA, 20 bp, synthetic construct
  misc_feature 1..20: note = chemically synthesized
  source 1..20: mol_type = other DNA
gaatgtgctcttggttggct

SEQ ID NO: 55681 - DNA, 20 bp, synthetic construct
  misc_feature 1..20: note = chemically synthesized
  source 1..20: mol_type = other DNA
aatgtgctcttggttggctt

SEQ ID NO: 55682 - DNA, 20 bp, synthetic construct
  misc_feature 1..20: note = chemically synthesized
  source 1..20: mol_type = other DNA
tgctcttggttggcttggga

SEQ ID NO: 55683 - DNA, 20 bp, synthetic construct
  misc_feature 1..20: note = chemically synthesized
  source 1..20: mol_type = other DNA
ctcttggttggcttgggata

SEQ ID NO: 55684 - DNA, 20 bp, synthetic construct
  misc_feature 1..20: note = chemically synthesized
  source 1..20: mol_type = other DNA
tggttggcttgggatagaga

SEQ ID NO: 55685 - DNA, 20 bp, synthetic construct
  misc_feature 1..20: note = chemically synthesized
  source 1..20: mol_type = other DNA
ggttggcttgggatagagaa

SEQ ID NO: 55686 - DNA, 20 bp, synthetic construct
  misc_feature 1..20: note = chemically synthesized
  source 1..20: mol_type = other DNA
ttggcttgggatagagaaag

SEQ ID NO: 55687 - DNA, 20 bp, synthetic construct
  misc_feature 1..20: note = chemically synthesized
  source 1..20: mol_type = other DNA
aaggagtcatatttaccctc

SEQ ID NO: 55688 - DNA, 20 bp, synthetic construct
  misc_feature 1..20: note = chemically synthesized
  source 1..20: mol_type = other DNA
aggagtcatatttaccctct

SEQ ID NO: 55689 - DNA, 20 bp, synthetic construct
  misc_feature 1..20: note = chemically synthesized
  source 1..20: mol_type = other DNA
atttaccctctaggaattaa

SEQ ID NO: 55690 - DNA, 20 bp, synthetic construct
  misc_feature 1..20: note = chemically synthesized
  source 1..20: mol_type = other DNA
ctaggaattaaaagtaacac

SEQ ID NO: 55691 - DNA, 20 bp, synthetic construct
  misc_feature 1..20: note = chemically synthesized
  source 1..20: mol_type = other DNA
aggaattaaaagtaacactg

SEQ ID NO: 55692 - DNA, 20 bp, synthetic construct
  misc_feature 1..20: note = chemically synthesized
  source 1..20: mol_type = other DNA
aagtaacactggagtgacct

SEQ ID NO: 55693 - DNA, 20 bp, synthetic construct
  misc_feature 1..20: note = chemically synthesized
  source 1..20: mol_type = other DNA
gtaacactggagtgacctga

SEQ ID NO: 55694 - DNA, 20 bp, synthetic construct
  misc_feature 1..20: note = chemically synthesized
  source 1..20: mol_type = other DNA
aacactggagtgacctgaga

SEQ ID NO: 55695 - DNA, 20 bp, synthetic construct
  misc_feature 1..20: note = chemically synthesized
  source 1..20: mol_type = other DNA
acactggagtgacctgagag

SEQ ID NO: 55696 - DNA, 20 bp, synthetic construct
  misc_feature 1..20: note = chemically synthesized
  source 1..20: mol_type = other DNA
gtgacctgagagaggaatcc

SEQ ID NO: 55697 - DNA, 20 bp, synthetic construct
  misc_feature 1..20: note = chemically synthesized
  source 1..20: mol_type = other DNA
ctccccttgtcattttgccc

SEQ ID NO: 55698 - DNA, 20 bp, synthetic construct
  misc_feature 1..20: note = chemically synthesized
  source 1..20: mol_type = other DNA
tgtcattttgcccaagattt

SEQ ID NO: 55699 - DNA, 20 bp, synthetic construct
  misc_feature 1..20: note = chemically synthesized
  source 1..20: mol_type = other DNA
tcattttgcccaagatttca

SEQ ID NO: 55700 - DNA, 20 bp, synthetic construct
  misc_feature 1..20: note = chemically synthesized
  source 1..20: mol_type = other DNA
agcctaattgaaacatacaa

SEQ ID NO: 55701 - DNA, 20 bp, synthetic construct
  misc_feature 1..20: note = chemically synthesized
  source 1..20: mol_type = other DNA
gaaacatacaaaagcaccac

SEQ ID NO: 55702 - DNA, 20 bp, synthetic construct
  misc_feature 1..20: note = chemically synthesized
  source 1..20: mol_type = other DNA
aacatacaaaagcaccacca

SEQ ID NO: 55703 - DNA, 20 bp, synthetic construct
  misc_feature 1..20: note = chemically synthesized
  source 1..20: mol_type = other DNA
gcaccaccagagtcgccctc

SEQ ID NO: 55704 - DNA, 20 bp, synthetic construct
  misc_feature 1..20: note = chemically synthesized
  source 1..20: mol_type = other DNA
agtcgccctctagccttctg

SEQ ID NO: 55705 - DNA, 20 bp, synthetic construct
  misc_feature 1..20: note = chemically synthesized
  source 1..20: mol_type = other DNA
cctctagccttctgaagatc

SEQ ID NO: 55706 - DNA, 20 bp, synthetic construct
  misc_feature 1..20: note = chemically synthesized
  source 1..20: mol_type = other DNA
ctagccttctgaagatccag

SEQ ID NO: 55707 - DNA, 20 bp, synthetic construct
  misc_feature 1..20: note = chemically synthesized
  source 1..20: mol_type = other DNA
tagccttctgaagatccagt

SEQ ID NO: 55708 - DNA, 20 bp, synthetic construct
  misc_feature 1..20: note = chemically synthesized
  source 1..20: mol_type = other DNA
agccttctgaagatccagtg

SEQ ID NO: 55709 - DNA, 20 bp, synthetic construct
  misc_feature 1..20: note = chemically synthesized
  source 1..20: mol_type = other DNA
cttctgaagatccagtgggg

SEQ ID NO: 55710 - DNA, 20 bp, synthetic construct
  misc_feature 1..20: note = chemically synthesized
  source 1..20: mol_type = other DNA
aagatccagtggggtggatg

SEQ ID NO: 55711 - DNA, 20 bp, synthetic construct
  misc_feature 1..20: note = chemically synthesized
  source 1..20: mol_type = other DNA
gatccagtggggtggatgtg

SEQ ID NO: 55712 - DNA, 20 bp, synthetic construct
  misc_feature 1..20: note = chemically synthesized
  source 1..20: mol_type = other DNA
cagtggggtggatgtggagc

SEQ ID NO: 55713 - DNA, 20 bp, synthetic construct
  misc_feature 1..20: note = chemically synthesized
  source 1..20: mol_type = other DNA
tggggtggatgtggagccag

SEQ ID NO: 55714 - DNA, 20 bp, synthetic construct
  misc_feature 1..20: note = chemically synthesized
  source 1..20: mol_type = other DNA
ggtggatgtggagccagtgg

SEQ ID NO: 55715 - DNA, 20 bp, synthetic construct
  misc_feature 1..20: note = chemically synthesized
  source 1..20: mol_type = other DNA
gtggagccagtggaagaatc

SEQ ID NO: 55716 - DNA, 20 bp, synthetic construct
  misc_feature 1..20: note = chemically synthesized
  source 1..20: mol_type = other DNA
ccagtggaagaatctggaaa

SEQ ID NO: 55717 - DNA, 20 bp, synthetic construct
  misc_feature 1..20: note = chemically synthesized
  source 1..20: mol_type = other DNA
gtggaagaatctggaaaaag

SEQ ID NO: 55718 - DNA, 20 bp, synthetic construct
  misc_feature 1..20: note = chemically synthesized
  source 1..20: mol_type = other DNA
ggaagaatctggaaaaagca

SEQ ID NO: 55719 - DNA, 20 bp, synthetic construct
  misc_feature 1..20: note = chemically synthesized
  source 1..20: mol_type = other DNA
gaatctggaaaaagcagagc

SEQ ID NO: 55720 - DNA, 20 bp, synthetic construct
  misc_feature 1..20: note = chemically synthesized
  source 1..20: mol_type = other DNA
aatctggaaaaagcagagct

SEQ ID NO: 55721 - DNA, 20 bp, synthetic construct
  misc_feature 1..20: note = chemically synthesized
  source 1..20: mol_type = other DNA
aaaagcagagctgggcttat

SEQ ID NO: 55722 - DNA, 20 bp, synthetic construct
  misc_feature 1..20: note = chemically synthesized
  source 1..20: mol_type = other DNA
aaagcagagctgggcttata

SEQ ID NO: 55723 - DNA, 20 bp, synthetic construct
  misc_feature 1..20: note = chemically synthesized
  source 1..20: mol_type = other DNA
agcagagctgggcttataag

SEQ ID NO: 55724 - DNA, 20 bp, synthetic construct
  misc_feature 1..20: note = chemically synthesized
  source 1..20: mol_type = other DNA
gcagagctgggcttataagg

SEQ ID NO: 55725 - DNA, 20 bp, synthetic construct
  misc_feature 1..20: note = chemically synthesized
  source 1..20: mol_type = other DNA
aggaggatgatgtaatgtga

SEQ ID NO: 55726 - DNA, 20 bp, synthetic construct
  misc_feature 1..20: note = chemically synthesized
  source 1..20: mol_type = other DNA
gaggatgatgtaatgtgata

SEQ ID NO: 55727 - DNA, 20 bp, synthetic construct
  misc_feature 1..20: note = chemically synthesized
  source 1..20: mol_type = other DNA
aggatgatgtaatgtgatag

SEQ ID NO: 55728 - DNA, 20 bp, synthetic construct
  misc_feature 1..20: note = chemically synthesized
  source 1..20: mol_type = other DNA
gatgatgtaatgtgatagag

SEQ ID NO: 55729 - DNA, 20 bp, synthetic construct
  misc_feature 1..20: note = chemically synthesized
  source 1..20: mol_type = other DNA
taatgtgatagaggagatgt

SEQ ID NO: 55730 - DNA, 20 bp, synthetic construct
  misc_feature 1..20: note = chemically synthesized
  source 1..20: mol_type = other DNA
tatacctgaatgttttgacc

SEQ ID NO: 55731 - DNA, 20 bp, synthetic construct
  misc_feature 1..20: note = chemically synthesized
  source 1..20: mol_type = other DNA
ttttgacctagtgcaatatc

SEQ ID NO: 55732 - DNA, 20 bp, synthetic construct
  misc_feature 1..20: note = chemically synthesized
  source 1..20: mol_type = other DNA
tttgacctagtgcaatatct

SEQ ID NO: 55733 - DNA, 20 bp, synthetic construct
  misc_feature 1..20: note = chemically synthesized
  source 1..20: mol_type = other DNA
gtgcaatatctgggtcactg

SEQ ID NO: 55734 - DNA, 20 bp, synthetic construct
  misc_feature 1..20: note = chemically synthesized
  source 1..20: mol_type = other DNA
tctgggtcactgcagccatt

SEQ ID NO: 55735 - DNA, 20 bp, synthetic construct
  misc_feature 1..20: note = chemically synthesized
  source 1..20: mol_type = other DNA
ctgcagccattcagaaatcc

SEQ ID NO: 55736 - DNA, 20 bp, synthetic construct
  misc_feature 1..20: note = chemically synthesized
  source 1..20: mol_type = other DNA
tgcagccattcagaaatcca

SEQ ID NO: 55737 - DNA, 20 bp, synthetic construct
  misc_feature 1..20: note = chemically synthesized
  source 1..20: mol_type = other DNA
atacgatgaacatgtatgca

SEQ ID NO: 55738 - DNA, 20 bp, synthetic construct
  misc_feature 1..20: note = chemically synthesized
  source 1..20: mol_type = other DNA
atgcacagtaaaaaaaatac

SEQ ID NO: 55739 - DNA, 20 bp, synthetic construct
  misc_feature 1..20: note = chemically synthesized
  source 1..20: mol_type = other DNA
cacagtaaaaaaaatactag

SEQ ID NO: 55740 - DNA, 20 bp, synthetic construct
  misc_feature 1..20: note = chemically synthesized
  source 1..20: mol_type = other DNA
agtaaaaaaaatactagaag

SEQ ID NO: 55741 - DNA, 20 bp, synthetic construct
  misc_feature 1..20: note = chemically synthesized
  source 1..20: mol_type = other DNA
accatctattaattatactt

SEQ ID NO: 55742 - DNA, 20 bp, synthetic construct
  misc_feature 1..20: note = chemically synthesized
  source 1..20: mol_type = other DNA
tctattaattatacttaagc

SEQ ID NO: 55743 - DNA, 20 bp, synthetic construct
  misc_feature 1..20: note = chemically synthesized
  source 1..20: mol_type = other DNA
taagctggtcccccattact

SEQ ID NO: 55744 - DNA, 20 bp, synthetic construct
  misc_feature 1..20: note = chemically synthesized
  source 1..20: mol_type = other DNA
agctggtcccccattactga

SEQ ID NO: 55745 - DNA, 20 bp, synthetic construct
  misc_feature 1..20: note = chemically synthesized
  source 1..20: mol_type = other DNA
agtgcattactatataatta

SEQ ID NO: 55746 - DNA, 20 bp, synthetic construct
  misc_feature 1..20: note = chemically synthesized
  source 1..20: mol_type = other DNA
actatataattaaagccatt

SEQ ID NO: 55747 - DNA, 20 bp, synthetic construct
  misc_feature 1..20: note = chemically synthesized
  source 1..20: mol_type = other DNA
taattaaagccatttagaca

SEQ ID NO: 55748 - DNA, 20 bp, synthetic construct
  misc_feature 1..20: note = chemically synthesized
  source 1..20: mol_type = other DNA
aaagccatttagacatggct

SEQ ID NO: 55749 - DNA, 20 bp, synthetic construct
  misc_feature 1..20: note = chemically synthesized
  source 1..20: mol_type = other DNA
catttagacatggcttggca

SEQ ID NO: 55750 - DNA, 20 bp, synthetic construct
  misc_feature 1..20: note = chemically synthesized
  source 1..20: mol_type = other DNA
acatactaaaaactcctcct

SEQ ID NO: 55751 - DNA, 20 bp, synthetic construct
  misc_feature 1..20: note = chemically synthesized
  source 1..20: mol_type = other DNA
catactaaaaactcctcctt

SEQ ID NO: 55752 - DNA, 20 bp, synthetic construct
  misc_feature 1..20: note = chemically synthesized
  source 1..20: mol_type = other DNA
actaaaaactcctccttagg

SEQ ID NO: 55753 - DNA, 20 bp, synthetic construct
  misc_feature 1..20: note = chemically synthesized
  source 1..20: mol_type = other DNA
aggcagccttcttttcctat

SEQ ID NO: 55754 - DNA, 20 bp, synthetic construct
  misc_feature 1..20: note = chemically synthesized
  source 1..20: mol_type = other DNA
ccttcttttcctatcagatt

SEQ ID NO: 55755 - DNA, 20 bp, synthetic construct
  misc_feature 1..20: note = chemically synthesized
  source 1..20: mol_type = other DNA
ttcttttcctatcagattca

SEQ ID NO: 55756 - DNA, 20 bp, synthetic construct
  misc_feature 1..20: note = chemically synthesized
  source 1..20: mol_type = other DNA
gagctcctttctccttttct

SEQ ID NO: 55757 - DNA, 20 bp, synthetic construct
  misc_feature 1..20: note = chemically synthesized
  source 1..20: mol_type = other DNA
tcctttctccttttctcggt

SEQ ID NO: 55758 - DNA, 20 bp, synthetic construct
  misc_feature 1..20: note = chemically synthesized
  source 1..20: mol_type = other DNA
tttctcggtaagaatgaaca

SEQ ID NO: 55759 - DNA, 20 bp, synthetic construct
  misc_feature 1..20: note = chemically synthesized
  source 1..20: mol_type = other DNA
ttctcggtaagaatgaacac

SEQ ID NO: 55760 - DNA, 20 bp, synthetic construct
  misc_feature 1..20: note = chemically synthesized
  source 1..20: mol_type = other DNA
tcggtaagaatgaacacagg

SEQ ID NO: 55761 - DNA, 20 bp, synthetic construct
  misc_feature 1..20: note = chemically synthesized
  source 1..20: mol_type = other DNA
gaacacaggtagaaaattct

SEQ ID NO: 55762 - DNA, 20 bp, synthetic construct
  misc_feature 1..20: note = chemically synthesized
  source 1..20: mol_type = other DNA
acaggtagaaaattctcagt

SEQ ID NO: 55763 - DNA, 20 bp, synthetic construct
  misc_feature 1..20: note = chemically synthesized
  source 1..20: mol_type = other DNA
caggtagaaaattctcagtt

SEQ ID NO: 55764 - DNA, 20 bp, synthetic construct
  misc_feature 1..20: note = chemically synthesized
  source 1..20: mol_type = other DNA
aaattctcagttaggatctc

SEQ ID NO: 55765 - DNA, 20 bp, synthetic construct
  misc_feature 1..20: note = chemically synthesized
  source 1..20: mol_type = other DNA
ctcagttaggatctccagcc

SEQ ID NO: 55766 - DNA, 20 bp, synthetic construct
  misc_feature 1..20: note = chemically synthesized
  source 1..20: mol_type = other DNA
tcagttaggatctccagcct

SEQ ID NO: 55767 - DNA, 20 bp, synthetic construct
  misc_feature 1..20: note = chemically synthesized
  source 1..20: mol_type = other DNA
gatctccagcctgggcttgt

SEQ ID NO: 55768 - DNA, 20 bp, synthetic construct
  misc_feature 1..20: note = chemically synthesized
  source 1..20: mol_type = other DNA
tccagcctgggcttgtgagc

SEQ ID NO: 55769 - DNA, 20 bp, synthetic construct
  misc_feature 1..20: note = chemically synthesized
  source 1..20: mol_type = other DNA
gcttgtgagctggccctacc

SEQ ID NO: 55770 - DNA, 20 bp, synthetic construct
  misc_feature 1..20: note = chemically synthesized
  source 1..20: mol_type = other DNA
tgtgagctggccctacctgg

SEQ ID NO: 55771 - DNA, 20 bp, synthetic construct
  misc_feature 1..20: note = chemically synthesized
  source 1..20: mol_type = other DNA
tcttgcttttgtatatgtga

SEQ ID NO: 55772 - DNA, 20 bp, synthetic construct
  misc_feature 1..20: note = chemically synthesized
  source 1..20: mol_type = other DNA
tgcttttgtatatgtgacgg

SEQ ID NO: 55773 - DNA, 20 bp, synthetic construct
  misc_feature 1..20: note = chemically synthesized
  source 1..20: mol_type = other DNA
tgtatatgtgacggaagaat

SEQ ID NO: 55774 - DNA, 20 bp, synthetic construct
  misc_feature 1..20: note = chemically synthesized
  source 1..20: mol_type = other DNA
tatgtgacggaagaataagt

SEQ ID NO: 55775 - DNA, 20 bp, synthetic construct
  misc_feature 1..20: note = chemically synthesized
  source 1..20: mol_type = other DNA
cggaagaataagtaagtctt

SEQ ID NO: 55776 - DNA, 20 bp, synthetic construct
  misc_feature 1..20: note = chemically synthesized
  source 1..20: mol_type = other DNA
ggaagaataagtaagtcttc

SEQ ID NO: 55777 - DNA, 20 bp, synthetic construct
  misc_feature 1..20: note = chemically synthesized
  source 1..20: mol_type = other DNA
gaagaataagtaagtcttca

SEQ ID NO: 55778 - DNA, 20 bp, synthetic construct
  misc_feature 1..20: note = chemically synthesized
  source 1..20: mol_type = other DNA
aagaataagtaagtcttcag

SEQ ID NO: 55779 - DNA, 20 bp, synthetic construct
  misc_feature 1..20: note = chemically synthesized
  source 1..20: mol_type = other DNA
taagtcttcaggggaaaatc

SEQ ID NO: 55780 - DNA, 20 bp, synthetic construct
  misc_feature 1..20: note = chemically synthesized
  source 1..20: mol_type = other DNA
atccagaacaacccaacttc

SEQ ID NO: 55781 - DNA, 20 bp, synthetic construct
  misc_feature 1..20: note = chemically synthesized
  source 1..20: mol_type = other DNA
aacaacccaacttctagcaa

SEQ ID NO: 55782 - DNA, 20 bp, synthetic construct
  misc_feature 1..20: note = chemically synthesized
  source 1..20: mol_type = other DNA
acaacccaacttctagcaac

SEQ ID NO: 55783 - DNA, 20 bp, synthetic construct
  misc_feature 1..20: note = chemically synthesized
  source 1..20: mol_type = other DNA
tagcaacaggtctttctcaa

SEQ ID NO: 55784 - DNA, 20 bp, synthetic construct
  misc_feature 1..20: note = chemically synthesized
  source 1..20: mol_type = other DNA
gtctttctcaatagcttcat

SEQ ID NO: 55785 - DNA, 20 bp, synthetic construct
  misc_feature 1..20: note = chemically synthesized
  source 1..20: mol_type = other DNA
aaaacattacccaatatgat

SEQ ID NO: 55786 - DNA, 20 bp, synthetic construct
  misc_feature 1..20: note = chemically synthesized
  source 1..20: mol_type = other DNA
aaacattacccaatatgatt

SEQ ID NO: 55787 - DNA, 20 bp, synthetic construct
  misc_feature 1..20: note = chemically synthesized
  source 1..20: mol_type = other DNA
caatatgattaggattgtaa

SEQ ID NO: 55788 - DNA, 20 bp, synthetic construct
  misc_feature 1..20: note = chemically synthesized
  source 1..20: mol_type = other DNA
atatgattaggattgtaaaa

SEQ ID NO: 55789 - DNA, 20 bp, synthetic construct
  misc_feature 1..20: note = chemically synthesized
  source 1..20: mol_type = other DNA
tatgattaggattgtaaaag

SEQ ID NO: 55790 - DNA, 20 bp, synthetic construct
  misc_feature 1..20: note = chemically synthesized
  source 1..20: mol_type = other DNA
attgtaaaagaggaccacct

SEQ ID NO: 55791 - DNA, 20 bp, synthetic construct
  misc_feature 1..20: note = chemically synthesized
  source 1..20: mol_type = other DNA
aagaggaccacctgagctga

SEQ ID NO: 55792 - DNA, 20 bp, synthetic construct
  misc_feature 1..20: note = chemically synthesized
  source 1..20: mol_type = other DNA
acctgagctgacagcacctc

SEQ ID NO: 55793 - DNA, 20 bp, synthetic construct
  misc_feature 1..20: note = chemically synthesized
  source 1..20: mol_type = other DNA
cagcacctctggcctcaaaa

SEQ ID NO: 55794 - DNA, 20 bp, synthetic construct
  misc_feature 1..20: note = chemically synthesized
  source 1..20: mol_type = other DNA
agcacctctggcctcaaaat

SEQ ID NO: 55795 - DNA, 20 bp, synthetic construct
  misc_feature 1..20: note = chemically synthesized
  source 1..20: mol_type = other DNA
cctctggcctcaaaatgggc

SEQ ID NO: 55796 - DNA, 20 bp, synthetic construct
  misc_feature 1..20: note = chemically synthesized
  source 1..20: mol_type = other DNA
ctggcctcaaaatgggctgg

SEQ ID NO: 55797 - DNA, 20 bp, synthetic construct
  misc_feature 1..20: note = chemically synthesized
  source 1..20: mol_type = other DNA
gcctcaaaatgggctggcag

SEQ ID NO: 55798 - DNA, 20 bp, synthetic construct
  misc_feature 1..20: note = chemically synthesized
  source 1..20: mol_type = other DNA
ggctggcagaagaccattca

SEQ ID NO: 55799 - DNA, 20 bp, synthetic construct
  misc_feature 1..20: note = chemically synthesized
  source 1..20: mol_type = other DNA
aagaccattcaaagataaaa

SEQ ID NO: 55800 - DNA, 20 bp, synthetic construct
  misc_feature 1..20: note = chemically synthesized
  source 1..20: mol_type = other DNA
agaccattcaaagataaaat

SEQ ID NO: 55801 - DNA, 20 bp, synthetic construct
  misc_feature 1..20: note = chemically synthesized
  source 1..20: mol_type = other DNA
aaagataaaatgggctgttc

SEQ ID NO: 55802 - DNA, 20 bp, synthetic construct
  misc_feature 1..20: note = chemically synthesized
  source 1..20: mol_type = other DNA
gataaaatgggctgttccag

SEQ ID NO: 55803 - DNA, 20 bp, synthetic construct
  misc_feature 1..20: note = chemically synthesized
  source 1..20: mol_type = other DNA
ataaaatgggctgttccagt

SEQ ID NO: 55804 - DNA, 20 bp, synthetic construct
  misc_feature 1..20: note = chemically synthesized
  source 1..20: mol_type = other DNA
aaaatgggctgttccagtgg

SEQ ID NO: 55805 - DNA, 20 bp, synthetic construct
  misc_feature 1..20: note = chemically synthesized
  source 1..20: mol_type = other DNA
tgggctgttccagtgggagt

SEQ ID NO: 55806 - DNA, 20 bp, synthetic construct
  misc_feature 1..20: note = chemically synthesized
  source 1..20: mol_type = other DNA
ggagtgagctccctacttgt

SEQ ID NO: 55807 - DNA, 20 bp, synthetic construct
  misc_feature 1..20: note = chemically synthesized
  source 1..20: mol_type = other DNA
agtgagctccctacttgtga

SEQ ID NO: 55808 - DNA, 20 bp, synthetic construct
  misc_feature 1..20: note = chemically synthesized
  source 1..20: mol_type = other DNA
ccctacttgtgagagtattc

SEQ ID NO: 55809 - DNA, 20 bp, synthetic construct
  misc_feature 1..20: note = chemically synthesized
  source 1..20: mol_type = other DNA
tacttgtgagagtattcaag

SEQ ID NO: 55810 - DNA, 20 bp, synthetic construct
  misc_feature 1..20: note = chemically synthesized
  source 1..20: mol_type = other DNA
cttgtgagagtattcaagta

SEQ ID NO: 55811 - DNA, 20 bp, synthetic construct
  misc_feature 1..20: note = chemically synthesized
  source 1..20: mol_type = other DNA
tgtgagagtattcaagtaga

SEQ ID NO: 55812 - DNA, 20 bp, synthetic construct
  misc_feature 1..20: note = chemically synthesized
  source 1..20: mol_type = other DNA
tgagagtattcaagtagaga

SEQ ID NO: 55813 - DNA, 20 bp, synthetic construct
  misc_feature 1..20: note = chemically synthesized
  source 1..20: mol_type = other DNA
gagagtattcaagtagagag

SEQ ID NO: 55814 - DNA, 20 bp, synthetic construct
  misc_feature 1..20: note = chemically synthesized
  source 1..20: mol_type = other DNA
gagtattcaagtagagagag

SEQ ID NO: 55815 - DNA, 20 bp, synthetic construct
  misc_feature 1..20: note = chemically synthesized
  source 1..20: mol_type = other DNA
agtattcaagtagagagagg

SEQ ID NO: 55816 - DNA, 20 bp, synthetic construct
  misc_feature 1..20: note = chemically synthesized
  source 1..20: mol_type = other DNA
gtagagagaggaggacctcc

SEQ ID NO: 55817 - DNA, 20 bp, synthetic construct
  misc_feature 1..20: note = chemically synthesized
  source 1..20: mol_type = other DNA
gagagaggaggacctcctgg

SEQ ID NO: 55818 - DNA, 20 bp, synthetic construct
  misc_feature 1..20: note = chemically synthesized
  source 1..20: mol_type = other DNA
agagaggaggacctcctggc

SEQ ID NO: 55819 - DNA, 20 bp, synthetic construct
  misc_feature 1..20: note = chemically synthesized
  source 1..20: mol_type = other DNA
cctggcgggaaacttgcata

SEQ ID NO: 55820 - DNA, 20 bp, synthetic construct
  misc_feature 1..20: note = chemically synthesized
  source 1..20: mol_type = other DNA
tgcatatggtgtacgtgata

SEQ ID NO: 55821 - DNA, 20 bp, synthetic construct
  misc_feature 1..20: note = chemically synthesized
  source 1..20: mol_type = other DNA
gatatggcacctccatctga

SEQ ID NO: 55822 - DNA, 20 bp, synthetic construct
  misc_feature 1..20: note = chemically synthesized
  source 1..20: mol_type = other DNA
tatggcacctccatctgaaa

SEQ ID NO: 55823 - DNA, 20 bp, synthetic construct
  misc_feature 1..20: note = chemically synthesized
  source 1..20: mol_type = other DNA
catctgaaagagtctgtgct

SEQ ID NO: 55824 - DNA, 20 bp, synthetic construct
  misc_feature 1..20: note = chemically synthesized
  source 1..20: mol_type = other DNA
atctgaaagagtctgtgctg

SEQ ID NO: 55825 - DNA, 20 bp, synthetic construct
  misc_feature 1..20: note = chemically synthesized
  source 1..20: mol_type = other DNA
tctgaaagagtctgtgctga

SEQ ID NO: 55826 - DNA, 20 bp, synthetic construct
  misc_feature 1..20: note = chemically synthesized
  source 1..20: mol_type = other DNA
gaaagagtctgtgctgaggg

SEQ ID NO: 55827 - DNA, 20 bp, synthetic construct
  misc_feature 1..20: note = chemically synthesized
  source 1..20: mol_type = other DNA
aaagagtctgtgctgagggc

SEQ ID NO: 55828 - DNA, 20 bp, synthetic construct
  misc_feature 1..20: note = chemically synthesized
  source 1..20: mol_type = other DNA
agtctgtgctgagggcaggc

SEQ ID NO: 55829 - DNA, 20 bp, synthetic construct
  misc_feature 1..20: note = chemically synthesized
  source 1..20: mol_type = other DNA
tctgtgctgagggcaggctg

SEQ ID NO: 55830 - DNA, 20 bp, synthetic construct
  misc_feature 1..20: note = chemically synthesized
  source 1..20: mol_type = other DNA
gggcaggctggagtcacaca

SEQ ID NO: 55831 - DNA, 20 bp, synthetic construct
  misc_feature 1..20: note = chemically synthesized
  source 1..20: mol_type = other DNA
ggcaggctggagtcacacat

SEQ ID NO: 55832 - DNA, 20 bp, synthetic construct
  misc_feature 1..20: note = chemically synthesized
  source 1..20: mol_type = other DNA
ctggagtcacacatgggaat

SEQ ID NO: 55833 - DNA, 20 bp, synthetic construct
  misc_feature 1..20: note = chemically synthesized
  source 1..20: mol_type = other DNA
agtcacacatgggaataagc

SEQ ID NO: 55834 - DNA, 20 bp, synthetic construct
  misc_feature 1..20: note = chemically synthesized
  source 1..20: mol_type = other DNA
gtcacacatgggaataagcc

SEQ ID NO: 55835 - DNA, 20 bp, synthetic construct
  misc_feature 1..20: note = chemically synthesized
  source 1..20: mol_type = other DNA
tccgtgatttaattccacga

SEQ ID NO: 55836 - DNA, 20 bp, synthetic construct
  misc_feature 1..20: note = chemically synthesized
  source 1..20: mol_type = other DNA
gtgatttaattccacgacgg

SEQ ID NO: 55837 - DNA, 20 bp, synthetic construct
  misc_feature 1..20: note = chemically synthesized
  source 1..20: mol_type = other DNA
ttaattccacgacggcagaa

SEQ ID NO: 55838 - DNA, 20 bp, synthetic construct
  misc_feature 1..20: note = chemically synthesized
  source 1..20: mol_type = other DNA
ttccacgacggcagaatgga

SEQ ID NO: 55839 - DNA, 20 bp, synthetic construct
  misc_feature 1..20: note = chemically synthesized
  source 1..20: mol_type = other DNA
atgtcacttgctccaaatac

SEQ ID NO: 55840 - DNA, 20 bp, synthetic construct
  misc_feature 1..20: note = chemically synthesized
  source 1..20: mol_type = other DNA
ccagtgcccattgcttcaaa

SEQ ID NO: 55841 - DNA, 20 bp, synthetic construct
  misc_feature 1..20: note = chemically synthesized
  source 1..20: mol_type = other DNA
gtgcccattgcttcaaatag

SEQ ID NO: 55842 - DNA, 20 bp, synthetic construct
  misc_feature 1..20: note = chemically synthesized
  source 1..20: mol_type = other DNA
tagtagtcctcctcaatccc

SEQ ID NO: 55843 - DNA, 20 bp, synthetic construct
  misc_feature 1..20: note = chemically synthesized
  source 1..20: mol_type = other DNA
gtcctcctcaatccctggca

SEQ ID NO: 55844 - DNA, 20 bp, synthetic construct
  misc_feature 1..20: note = chemically synthesized
  source 1..20: mol_type = other DNA
gttgttgactttaaacaccg

SEQ ID NO: 55845 - DNA, 20 bp, synthetic construct
  misc_feature 1..20: note = chemically synthesized
  source 1..20: mol_type = other DNA
tcttacaacgacttcttgtg

SEQ ID NO: 55846 - DNA, 20 bp, synthetic construct
  misc_feature 1..20: note = chemically synthesized
  source 1..20: mol_type = other DNA
acaacgacttcttgtgcggc

SEQ ID NO: 55847 - DNA, 20 bp, synthetic construct
  misc_feature 1..20: note = chemically synthesized
  source 1..20: mol_type = other DNA
gacttcttgtgcggctggcc

SEQ ID NO: 55848 - DNA, 20 bp, synthetic construct
  misc_feature 1..20: note = chemically synthesized
  source 1..20: mol_type = other DNA
acttcttgtgcggctggccc

SEQ ID NO: 55849 - DNA, 20 bp, synthetic construct
  misc_feature 1..20: note = chemically synthesized
  source 1..20: mol_type = other DNA
tgtgcggctggcccaggacc

SEQ ID NO: 55850 - DNA, 20 bp, synthetic construct
  misc_feature 1..20: note = chemically synthesized
  source 1..20: mol_type = other DNA
gtgcggctggcccaggacct

SEQ ID NO: 55851 - DNA, 20 bp, synthetic construct
  misc_feature 1..20: note = chemically synthesized
  source 1..20: mol_type = other DNA
ggctggcccaggacctgggc

SEQ ID NO: 55852 - DNA, 20 bp, synthetic construct
  misc_feature 1..20: note = chemically synthesized
  source 1..20: mol_type = other DNA
gctggcccaggacctgggcg

SEQ ID NO: 55853 - DNA, 20 bp, synthetic construct
  misc_feature 1..20: note = chemically synthesized
  source 1..20: mol_type = other DNA
ggcccaggacctgggcgagg

SEQ ID NO: 55854 - DNA, 20 bp, synthetic construct
  misc_feature 1..20: note = chemically synthesized
  source 1..20: mol_type = other DNA
ccaggacctgggcgaggcag

SEQ ID NO: 55855 - DNA, 20 bp, synthetic construct
  misc_feature 1..20: note = chemically synthesized
  source 1..20: mol_type = other DNA
caggacctgggcgaggcagt

SEQ ID NO: 55856 - DNA, 20 bp, synthetic construct
  misc_feature 1..20: note = chemically synthesized
  source 1..20: mol_type = other DNA
aggacctgggcgaggcagta

SEQ ID NO: 55857 - DNA, 20 bp, synthetic construct
  misc_feature 1..20: note = chemically synthesized
  source 1..20: mol_type = other DNA
ggacctgggcgaggcagtag

SEQ ID NO: 55858 - DNA, 20 bp, synthetic construct
  misc_feature 1..20: note = chemically synthesized
  source 1..20: mol_type = other DNA
gcagtaggggatgacactga

SEQ ID NO: 55859 - DNA, 20 bp, synthetic construct
  misc_feature 1..20: note = chemically synthesized
  source 1..20: mol_type = other DNA
gggatgacactgacggatgc

SEQ ID NO: 55860 - DNA, 20 bp, synthetic construct
  misc_feature 1..20: note = chemically synthesized
  source 1..20: mol_type = other DNA
ggatgacactgacggatgcc

SEQ ID NO: 55861 - DNA, 20 bp, synthetic construct
  misc_feature 1..20: note = chemically synthesized
  source 1..20: mol_type = other DNA
gatgacactgacggatgcca

SEQ ID NO: 55862 - DNA, 20 bp, synthetic construct
  misc_feature 1..20: note = chemically synthesized
  source 1..20: mol_type = other DNA
atgacactgacggatgccag

SEQ ID NO: 55863 - DNA, 20 bp, synthetic construct
  misc_feature 1..20: note = chemically synthesized
  source 1..20: mol_type = other DNA
ggggcactaccgcactcttg

SEQ ID NO: 55864 - DNA, 20 bp, synthetic construct
  misc_feature 1..20: note = chemically synthesized
  source 1..20: mol_type = other DNA
gcactaccgcactcttgcag

SEQ ID NO: 55865 - DNA, 20 bp, synthetic construct
  misc_feature 1..20: note = chemically synthesized
  source 1..20: mol_type = other DNA
cactaccgcactcttgcaga

SEQ ID NO: 55866 - DNA, 20 bp, synthetic construct
  misc_feature 1..20: note = chemically synthesized
  source 1..20: mol_type = other DNA
ccgcactcttgcagaaggac

SEQ ID NO: 55867 - DNA, 20 bp, synthetic construct
  misc_feature 1..20: note = chemically synthesized
  source 1..20: mol_type = other DNA
tcttgcagaaggacaagacg

SEQ ID NO: 55868 - DNA, 20 bp, synthetic construct
  misc_feature 1..20: note = chemically synthesized
  source 1..20: mol_type = other DNA
tgcagaaggacaagacgtag

SEQ ID NO: 55869 - DNA, 20 bp, synthetic construct
  misc_feature 1..20: note = chemically synthesized
  source 1..20: mol_type = other DNA
aaggacaagacgtagaagac

SEQ ID NO: 55870 - DNA, 20 bp, synthetic construct
  misc_feature 1..20: note = chemically synthesized
  source 1..20: mol_type = other DNA
cgtagaagaccagctcgact

SEQ ID NO: 55871 - DNA, 20 bp, synthetic construct
  misc_feature 1..20: note = chemically synthesized
  source 1..20: mol_type = other DNA
gtagaagaccagctcgactt

SEQ ID NO: 55872 - DNA, 20 bp, synthetic construct
  misc_feature 1..20: note = chemically synthesized
  source 1..20: mol_type = other DNA
aagaccagctcgacttggga

SEQ ID NO: 55873 - DNA, 20 bp, synthetic construct
  misc_feature 1..20: note = chemically synthesized
  source 1..20: mol_type = other DNA
agaccagctcgacttgggat

SEQ ID NO: 55874 - DNA, 20 bp, synthetic construct
  misc_feature 1..20: note = chemically synthesized
  source 1..20: mol_type = other DNA
gaccagctcgacttgggatg

SEQ ID NO: 55875 - DNA, 20 bp, synthetic construct
  misc_feature 1..20: note = chemically synthesized
  source 1..20: mol_type = other DNA
accagctcgacttgggatgg

SEQ ID NO: 55876 - DNA, 20 bp, synthetic construct
  misc_feature 1..20: note = chemically synthesized
  source 1..20: mol_type = other DNA
cgacttgggatgggggtttc

SEQ ID NO: 55877 - DNA, 20 bp, synthetic construct
  misc_feature 1..20: note = chemically synthesized
  source 1..20: mol_type = other DNA
gacttgggatgggggtttca

SEQ ID NO: 55878 - DNA, 20 bp, synthetic construct
  misc_feature 1..20: note = chemically synthesized
  source 1..20: mol_type = other DNA
cttgggatgggggtttcaag

SEQ ID NO: 55879 - DNA, 20 bp, synthetic construct
  misc_feature 1..20: note = chemically synthesized
  source 1..20: mol_type = other DNA
atgggggtttcaaggagtca

SEQ ID NO: 55880 - DNA, 20 bp, synthetic construct
  misc_feature 1..20: note = chemically synthesized
  source 1..20: mol_type = other DNA
ttcaaggagtcaaagacgtg

SEQ ID NO: 55881 - DNA, 20 bp, synthetic construct
  misc_feature 1..20: note = chemically synthesized
  source 1..20: mol_type = other DNA
tcaaggagtcaaagacgtgc

SEQ ID NO: 55882 - DNA, 20 bp, synthetic construct
  misc_feature 1..20: note = chemically synthesized
  source 1..20: mol_type = other DNA
aaggagtcaaagacgtgcag

SEQ ID NO: 55883 - DNA, 20 bp, synthetic construct
  misc_feature 1..20: note = chemically synthesized
  source 1..20: mol_type = other DNA
aggagtcaaagacgtgcagg

SEQ ID NO: 55884 - DNA, 20 bp, synthetic construct
  misc_feature 1..20: note = chemically synthesized
  source 1..20: mol_type = other DNA
tcaaagacgtgcaggaggac

SEQ ID NO: 55885 - DNA, 20 bp, synthetic construct
  misc_feature 1..20: note = chemically synthesized
  source 1..20: mol_type = other DNA
caaagacgtgcaggaggacg

SEQ ID NO: 55886 - DNA, 20 bp, synthetic construct
  misc_feature 1..20: note = chemically synthesized
  source 1..20: mol_type = other DNA
aaagacgtgcaggaggacga

SEQ ID NO: 55887 - DNA, 20 bp, synthetic construct
  misc_feature 1..20: note = chemically synthesized
  source 1..20: mol_type = other DNA
agacgtgcaggaggacgagg

SEQ ID NO: 55888 - DNA, 20 bp, synthetic construct
  misc_feature 1..20: note = chemically synthesized
  source 1..20: mol_type = other DNA
gacgtgcaggaggacgaggg

SEQ ID NO: 55889 - DNA, 20 bp, synthetic construct
  misc_feature 1..20: note = chemically synthesized
  source 1..20: mol_type = other DNA
gaggacgagggaggctacaa

SEQ ID NO: 55890 - DNA, 20 bp, synthetic construct
  misc_feature 1..20: note = chemically synthesized
  source 1..20: mol_type = other DNA
ggacgagggaggctacaata

SEQ ID NO: 55891 - DNA, 20 bp, synthetic construct
  misc_feature 1..20: note = chemically synthesized
  source 1..20: mol_type = other DNA
agggaggctacaatagagct

SEQ ID NO: 55892 - DNA, 20 bp, synthetic construct
  misc_feature 1..20: note = chemically synthesized
  source 1..20: mol_type = other DNA
gggaggctacaatagagctg

SEQ ID NO: 55893 - DNA, 20 bp, synthetic construct
  misc_feature 1..20: note = chemically synthesized
  source 1..20: mol_type = other DNA
aggctacaatagagctgagg

SEQ ID NO: 55894 - DNA, 20 bp, synthetic construct
  misc_feature 1..20: note = chemically synthesized
  source 1..20: mol_type = other DNA
acaatagagctgaggcggaa

SEQ ID NO: 55895 - DNA, 20 bp, synthetic construct
  misc_feature 1..20: note = chemically synthesized
  source 1..20: mol_type = other DNA
caatagagctgaggcggaat

SEQ ID NO: 55896 - DNA, 20 bp, synthetic construct
  misc_feature 1..20: note = chemically synthesized
  source 1..20: mol_type = other DNA
atagagctgaggcggaatgg

SEQ ID NO: 55897 - DNA, 20 bp, synthetic construct
  misc_feature 1..20: note = chemically synthesized
  source 1..20: mol_type = other DNA
cggaatgggagccacttgct

SEQ ID NO: 55898 - DNA, 20 bp, synthetic construct
  misc_feature 1..20: note = chemically synthesized
  source 1..20: mol_type = other DNA
acttgctgagtttccccttg

SEQ ID NO: 55899 - DNA, 20 bp, synthetic construct
  misc_feature 1..20: note = chemically synthesized
  source 1..20: mol_type = other DNA
gcagctctccctgtacatgc

SEQ ID NO: 55900 - DNA, 20 bp, synthetic construct
  misc_feature 1..20: note = chemically synthesized
  source 1..20: mol_type = other DNA
agctctccctgtacatgctg

SEQ ID NO: 55901 - DNA, 20 bp, synthetic construct
  misc_feature 1..20: note = chemically synthesized
  source 1..20: mol_type = other DNA
tccctgtacatgctggagtt

SEQ ID NO: 55902 - DNA, 20 bp, synthetic construct
  misc_feature 1..20: note = chemically synthesized
  source 1..20: mol_type = other DNA
cctgtacatgctggagttga

SEQ ID NO: 55903 - DNA, 20 bp, synthetic construct
  misc_feature 1..20: note = chemically synthesized
  source 1..20: mol_type = other DNA
tacatgctggagttgagagc

SEQ ID NO: 55904 - DNA, 20 bp, synthetic construct
  misc_feature 1..20: note = chemically synthesized
  source 1..20: mol_type = other DNA
ctggagttgagagccagccc

SEQ ID NO: 55905 - DNA, 20 bp, synthetic construct
  misc_feature 1..20: note = chemically synthesized
  source 1..20: mol_type = other DNA
tggagttgagagccagcccc

SEQ ID NO: 55906 - DNA, 20 bp, synthetic construct
  misc_feature 1..20: note = chemically synthesized
  source 1..20: mol_type = other DNA
tgagagccagccccaggcca

SEQ ID NO: 55907 - DNA, 20 bp, synthetic construct
  misc_feature 1..20: note = chemically synthesized
  source 1..20: mol_type = other DNA
agagccagccccaggccaaa

SEQ ID NO: 55908 - DNA, 20 bp, synthetic construct
  misc_feature 1..20: note = chemically synthesized
  source 1..20: mol_type = other DNA
cccaggccaaagagcgtgcc

SEQ ID NO: 55909 - DNA, 20 bp, synthetic construct
  misc_feature 1..20: note = chemically synthesized
  source 1..20: mol_type = other DNA
ccaggccaaagagcgtgccc

SEQ ID NO: 55910 - DNA, 20 bp, synthetic construct
  misc_feature 1..20: note = chemically synthesized
  source 1..20: mol_type = other DNA
aagagcgtgcccaggttctt

SEQ ID NO: 55911 - DNA, 20 bp, synthetic construct
  misc_feature 1..20: note = chemically synthesized
  source 1..20: mol_type = other DNA
agagcgtgcccaggttcttg

SEQ ID NO: 55912 - DNA, 20 bp, synthetic construct
  misc_feature 1..20: note = chemically synthesized
  source 1..20: mol_type = other DNA
agcgtgcccaggttcttgag

SEQ ID NO: 55913 - DNA, 20 bp, synthetic construct
  misc_feature 1..20: note = chemically synthesized
  source 1..20: mol_type = other DNA
gcgtgcccaggttcttgagg

SEQ ID NO: 55914 - DNA, 20 bp, synthetic construct
  misc_feature 1..20: note = chemically synthesized
  source 1..20: mol_type = other DNA
gcccaggttcttgaggaggc

SEQ ID NO: 55915 - DNA, 20 bp, synthetic construct
  misc_feature 1..20: note = chemically synthesized
  source 1..20: mol_type = other DNA
ggttcttgaggaggctggca

SEQ ID NO: 55916 - DNA, 20 bp, synthetic construct
  misc_feature 1..20: note = chemically synthesized
  source 1..20: mol_type = other DNA
gttcttgaggaggctggcaa

SEQ ID NO: 55917 - DNA, 20 bp, synthetic construct
  misc_feature 1..20: note = chemically synthesized
  source 1..20: mol_type = other DNA
ttcttgaggaggctggcaaa

SEQ ID NO: 55918 - DNA, 20 bp, synthetic construct
  misc_feature 1..20: note = chemically synthesized
  source 1..20: mol_type = other DNA
gaggaggctggcaaagggtg

SEQ ID NO: 55919 - DNA, 20 bp, synthetic construct
  misc_feature 1..20: note = chemically synthesized
  source 1..20: mol_type = other DNA
caaagggtgtggtgtcaatg

SEQ ID NO: 55920 - DNA, 20 bp, synthetic construct
  misc_feature 1..20: note = chemically synthesized
  source 1..20: mol_type = other DNA
gtgtcaatgtggacccattc

SEQ ID NO: 55921 - DNA, 20 bp, synthetic construct
  misc_feature 1..20: note = chemically synthesized
  source 1..20: mol_type = other DNA
ctggctgctcgcaccacctc

SEQ ID NO: 55922 - DNA, 20 bp, synthetic construct
  misc_feature 1..20: note = chemically synthesized
  source 1..20: mol_type = other DNA
tggctgctcgcaccacctct

SEQ ID NO: 55923 - DNA, 20 bp, synthetic construct
  misc_feature 1..20: note = chemically synthesized
  source 1..20: mol_type = other DNA
caccacctctgggctttctc

SEQ ID NO: 55924 - DNA, 20 bp, synthetic construct
  misc_feature 1..20: note = chemically synthesized
  source 1..20: mol_type = other DNA
ccacctctgggctttctcca

SEQ ID NO: 55925 - DNA, 20 bp, synthetic construct
  misc_feature 1..20: note = chemically synthesized
  source 1..20: mol_type = other DNA
tgggctttctccagagtcca

SEQ ID NO: 55926 - DNA, 20 bp, synthetic construct
  misc_feature 1..20: note = chemically synthesized
  source 1..20: mol_type = other DNA
gggctttctccagagtccac

SEQ ID NO: 55927 - DNA, 20 bp, synthetic construct
  misc_feature 1..20: note = chemically synthesized
  source 1..20: mol_type = other DNA
gctttctccagagtccacag

SEQ ID NO: 55928 - DNA, 20 bp, synthetic construct
  misc_feature 1..20: note = chemically synthesized
  source 1..20: mol_type = other DNA
ctttctccagagtccacagg

SEQ ID NO: 55929 - DNA, 20 bp, synthetic construct
  misc_feature 1..20: note = chemically synthesized
  source 1..20: mol_type = other DNA
gtccacaggaggtctacacc

SEQ ID NO: 55930 - DNA, 20 bp, synthetic construct
  misc_feature 1..20: note = chemically synthesized
  source 1..20: mol_type = other DNA
aggtctacacccagtccctt

SEQ ID NO: 55931 - DNA, 20 bp, synthetic construct
  misc_feature 1..20: note = chemically synthesized
  source 1..20: mol_type = other DNA
tctacacccagtcccttgag

SEQ ID NO: 55932 - DNA, 20 bp, synthetic construct
  misc_feature 1..20: note = chemically synthesized
  source 1..20: mol_type = other DNA
acacccagtcccttgagcag

SEQ ID NO: 55933 - DNA, 20 bp, synthetic construct
  misc_feature 1..20: note = chemically synthesized
  source 1..20: mol_type = other DNA
gagcagcagataaaatccga

SEQ ID NO: 55934 - DNA, 20 bp, synthetic construct
  misc_feature 1..20: note = chemically synthesized
  source 1..20: mol_type = other DNA
gcagataaaatccgatggcg

SEQ ID NO: 55935 - DNA, 20 bp, synthetic construct
  misc_feature 1..20: note = chemically synthesized
  source 1..20: mol_type = other DNA
aatccgatggcgaagctgaa

SEQ ID NO: 55936 - DNA, 20 bp, synthetic construct
  misc_feature 1..20: note = chemically synthesized
  source 1..20: mol_type = other DNA
atccgatggcgaagctgaac

SEQ ID NO: 55937 - DNA, 20 bp, synthetic construct
  misc_feature 1..20: note = chemically synthesized
  source 1..20: mol_type = other DNA
cgatggcgaagctgaacagg

SEQ ID NO: 55938 - DNA, 20 bp, synthetic construct
  misc_feature 1..20: note = chemically synthesized
  source 1..20: mol_type = other DNA
tggcgaagctgaacaggaag

SEQ ID NO: 55939 - DNA, 20 bp, synthetic construct
  misc_feature 1..20: note = chemically synthesized
  source 1..20: mol_type = other DNA
ggcgaagctgaacaggaaga

SEQ ID NO: 55940 - DNA, 20 bp, synthetic construct
  misc_feature 1..20: note = chemically synthesized
  source 1..20: mol_type = other DNA
ctgaacaggaagaaggtaat

SEQ ID NO: 55941 - DNA, 20 bp, synthetic construct
  misc_feature 1..20: note = chemically synthesized
  source 1..20: mol_type = other DNA
gtaatgagaaaatatttctt

SEQ ID NO: 55942 - DNA, 20 bp, synthetic construct
  misc_feature 1..20: note = chemically synthesized
  source 1..20: mol_type = other DNA
taatgagaaaatatttcttg

SEQ ID NO: 55943 - DNA, 20 bp, synthetic construct
  misc_feature 1..20: note = chemically synthesized
  source 1..20: mol_type = other DNA
gagaaaatatttcttgaggc

SEQ ID NO: 55944 - DNA, 20 bp, synthetic construct
  misc_feature 1..20: note = chemically synthesized
  source 1..20: mol_type = other DNA
atttcttgaggctggcatta

SEQ ID NO: 55945 - DNA, 20 bp, synthetic construct
  misc_feature 1..20: note = chemically synthesized
  source 1..20: mol_type = other DNA
ggctggcattatagatgctg

SEQ ID NO: 55946 - DNA, 20 bp, synthetic construct
  misc_feature 1..20: note = chemically synthesized
  source 1..20: mol_type = other DNA
cattatagatgctgtggatg

SEQ ID NO: 55947 - DNA, 20 bp, synthetic construct
  misc_feature 1..20: note = chemically synthesized
  source 1..20: mol_type = other DNA
gatgctgtggatgtggctga

SEQ ID NO: 55948 - DNA, 20 bp, synthetic construct
  misc_feature 1..20: note = chemically synthesized
  source 1..20: mol_type = other DNA
gtggctgaaagtttctgcaa

SEQ ID NO: 55949 - DNA, 20 bp, synthetic construct
  misc_feature 1..20: note = chemically synthesized
  source 1..20: mol_type = other DNA
tttctgcaacagcaatgcct

SEQ ID NO: 55950 - DNA, 20 bp, synthetic construct
  misc_feature 1..20: note = chemically synthesized
  source 1..20: mol_type = other DNA
ctgcaacagcaatgcctgag

SEQ ID NO: 55951 - DNA, 20 bp, synthetic construct
  misc_feature 1..20: note = chemically synthesized
  source 1..20: mol_type = other DNA
caacagcaatgcctgagtgg

SEQ ID NO: 55952 - DNA, 20 bp, synthetic construct
  misc_feature 1..20: note = chemically synthesized
  source 1..20: mol_type = other DNA
agcaatgcctgagtggaaga

SEQ ID NO: 55953 - DNA, 20 bp, synthetic construct
  misc_feature 1..20: note = chemically synthesized
  source 1..20: mol_type = other DNA
gtggaagaaagcatgactgt

SEQ ID NO: 55954 - DNA, 20 bp, synthetic construct
  misc_feature 1..20: note = chemically synthesized
  source 1..20: mol_type = other DNA
ggaagaaagcatgactgtga

SEQ ID NO: 55955 - DNA, 20 bp, synthetic construct
  misc_feature 1..20: note = chemically synthesized
  source 1..20: mol_type = other DNA
gaaagcatgactgtgagaga

SEQ ID NO: 55956 - DNA, 20 bp, synthetic construct
  misc_feature 1..20: note = chemically synthesized
  source 1..20: mol_type = other DNA
aaagcatgactgtgagagat

SEQ ID NO: 55957 - DNA, 20 bp, synthetic construct
  misc_feature 1..20: note = chemically synthesized
  source 1..20: mol_type = other DNA
gcatgactgtgagagatagg

SEQ ID NO: 55958 - DNA, 20 bp, synthetic construct
  misc_feature 1..20: note = chemically synthesized
  source 1..20: mol_type = other DNA
catgactgtgagagatagga

SEQ ID NO: 55959 - DNA, 20 bp, synthetic construct
  misc_feature 1..20: note = chemically synthesized
  source 1..20: mol_type = other DNA
tgtgagagataggaaggatt

SEQ ID NO: 55960 - DNA, 20 bp, synthetic construct
  misc_feature 1..20: note = chemically synthesized
  source 1..20: mol_type = other DNA
gtgagagataggaaggattt

SEQ ID NO: 55961 - DNA, 20 bp, synthetic construct
  misc_feature 1..20: note = chemically synthesized
  source 1..20: mol_type = other DNA
gaaggatttgggacctttgc

SEQ ID NO: 55962 - DNA, 20 bp, synthetic construct
  misc_feature 1..20: note = chemically synthesized
  source 1..20: mol_type = other DNA
aggatttgggacctttgcta

SEQ ID NO: 55963 - DNA, 20 bp, synthetic construct
  misc_feature 1..20: note = chemically synthesized
  source 1..20: mol_type = other DNA
ggatttgggacctttgctag

SEQ ID NO: 55964 - DNA, 20 bp, synthetic construct
  misc_feature 1..20: note = chemically synthesized
  source 1..20: mol_type = other DNA
tttgggacctttgctagagg

SEQ ID NO: 55965 - DNA, 20 bp, synthetic construct
  misc_feature 1..20: note = chemically synthesized
  source 1..20: mol_type = other DNA
ttgggacctttgctagaggt

SEQ ID NO: 55966 - DNA, 20 bp, synthetic construct
  misc_feature 1..20: note = chemically synthesized
  source 1..20: mol_type = other DNA
acctttgctagaggtgggtt

SEQ ID NO: 55967 - DNA, 20 bp, synthetic construct
  misc_feature 1..20: note = chemically synthesized
  source 1..20: mol_type = other DNA
ctttgctagaggtgggtttg

SEQ ID NO: 55968 - DNA, 20 bp, synthetic construct
  misc_feature 1..20: note = chemically synthesized
  source 1..20: mol_type = other DNA
tttgctagaggtgggtttgg

SEQ ID NO: 55969 - DNA, 20 bp, synthetic construct
  misc_feature 1..20: note = chemically synthesized
  source 1..20: mol_type = other DNA
tgctagaggtgggtttggag

SEQ ID NO: 55970 - DNA, 20 bp, synthetic construct
  misc_feature 1..20: note = chemically synthesized
  source 1..20: mol_type = other DNA
tagaggtgggtttggaggag

SEQ ID NO: 55971 - DNA, 20 bp, synthetic construct
  misc_feature 1..20: note = chemically synthesized
  source 1..20: mol_type = other DNA
agaggtgggtttggaggagt

SEQ ID NO: 55972 - DNA, 20 bp, synthetic construct
  misc_feature 1..20: note = chemically synthesized
  source 1..20: mol_type = other DNA
tgccatccgttctgcgactg

SEQ ID NO: 55973 - DNA, 20 bp, synthetic construct
  misc_feature 1..20: note = chemically synthesized
  source 1..20: mol_type = other DNA
gcgactgtggaattaaatca

SEQ ID NO: 55974 - DNA, 20 bp, synthetic construct
  misc_feature 1..20: note = chemically synthesized
  source 1..20: mol_type = other DNA
ctgtggaattaaatcacaga

SEQ ID NO: 55975 - DNA, 20 bp, synthetic construct
  misc_feature 1..20: note = chemically synthesized
  source 1..20: mol_type = other DNA
tggaattaaatcacagatgg

SEQ ID NO: 55976 - DNA, 20 bp, synthetic construct
  misc_feature 1..20: note = chemically synthesized
  source 1..20: mol_type = other DNA
attaaatcacagatggcaga

SEQ ID NO: 55977 - DNA, 20 bp, synthetic construct
  misc_feature 1..20: note = chemically synthesized
  source 1..20: mol_type = other DNA
ttaaatcacagatggcagat

SEQ ID NO: 55978 - DNA, 20 bp, synthetic construct
  misc_feature 1..20: note = chemically synthesized
  source 1..20: mol_type = other DNA
aaatcacagatggcagatgg

SEQ ID NO: 55979 - DNA, 20 bp, synthetic construct
  misc_feature 1..20: note = chemically synthesized
  source 1..20: mol_type = other DNA
aatcacagatggcagatggg

SEQ ID NO: 55980 - DNA, 20 bp, synthetic construct
  misc_feature 1..20: note = chemically synthesized
  source 1..20: mol_type = other DNA
atcacagatggcagatggga

SEQ ID NO: 55981 - DNA, 20 bp, synthetic construct
  misc_feature 1..20: note = chemically synthesized
  source 1..20: mol_type = other DNA
tggcagatgggagggtcgcc

SEQ ID NO: 55982 - DNA, 20 bp, synthetic construct
  misc_feature 1..20: note = chemically synthesized
  source 1..20: mol_type = other DNA
cttattcccatgtgtgactc

SEQ ID NO: 55983 - DNA, 20 bp, synthetic construct
  misc_feature 1..20: note = chemically synthesized
  source 1..20: mol_type = other DNA
actccagcctgccctcaata

SEQ ID NO: 55984 - DNA, 20 bp, synthetic construct
  misc_feature 1..20: note = chemically synthesized
  source 1..20: mol_type = other DNA
gccctcaatatagactcttt

SEQ ID NO: 55985 - DNA, 20 bp, synthetic construct
  misc_feature 1..20: note = chemically synthesized
  source 1..20: mol_type = other DNA
tcaatatagactctttcaga

SEQ ID NO: 55986 - DNA, 20 bp, synthetic construct
  misc_feature 1..20: note = chemically synthesized
  source 1..20: mol_type = other DNA
aatatagactctttcagatg

SEQ ID NO: 55987 - DNA, 20 bp, synthetic construct
  misc_feature 1..20: note = chemically synthesized
  source 1..20: mol_type = other DNA
atatagactctttcagatgg

SEQ ID NO: 55988 - DNA, 20 bp, synthetic construct
  misc_feature 1..20: note = chemically synthesized
  source 1..20: mol_type = other DNA
accgtatgcaaatttcctac

SEQ ID NO: 55989 - DNA, 20 bp, synthetic construct
  misc_feature 1..20: note = chemically synthesized
  source 1..20: mol_type = other DNA
ccgtatgcaaatttcctacc

SEQ ID NO: 55990 - DNA, 20 bp, synthetic construct
  misc_feature 1..20: note = chemically synthesized
  source 1..20: mol_type = other DNA
gtatgcaaatttcctaccag

SEQ ID NO: 55991 - DNA, 20 bp, synthetic construct
  misc_feature 1..20: note = chemically synthesized
  source 1..20: mol_type = other DNA
tatgcaaatttcctaccagg

SEQ ID NO: 55992 - DNA, 20 bp, synthetic construct
  misc_feature 1..20: note = chemically synthesized
  source 1..20: mol_type = other DNA
atctctacttgaaataccct

SEQ ID NO: 55993 - DNA, 20 bp, synthetic construct
  misc_feature 1..20: note = chemically synthesized
  source 1..20: mol_type = other DNA
ctctacttgaaataccctca

SEQ ID NO: 55994 - DNA, 20 bp, synthetic construct
  misc_feature 1..20: note = chemically synthesized
  source 1..20: mol_type = other DNA
tctacttgaaataccctcag

SEQ ID NO: 55995 - DNA, 20 bp, synthetic construct
  misc_feature 1..20: note = chemically synthesized
  source 1..20: mol_type = other DNA
acttgaaataccctcagagg

SEQ ID NO: 55996 - DNA, 20 bp, synthetic construct
  misc_feature 1..20: note = chemically synthesized
  source 1..20: mol_type = other DNA
cttgaaataccctcagaggt

SEQ ID NO: 55997 - DNA, 20 bp, synthetic construct
  misc_feature 1..20: note = chemically synthesized
  source 1..20: mol_type = other DNA
ttgaaataccctcagaggta

SEQ ID NO: 55998 - DNA, 20 bp, synthetic construct
  misc_feature 1..20: note = chemically synthesized
  source 1..20: mol_type = other DNA
gaaataccctcagaggtagg

SEQ ID NO: 55999 - DNA, 20 bp, synthetic construct
  misc_feature 1..20: note = chemically synthesized
  source 1..20: mol_type = other DNA
ggagctcacccccactataa

SEQ ID NO: 56000 - DNA, 20 bp, synthetic construct
  misc_feature 1..20: note = chemically synthesized
  source 1..20: mol_type = other DNA
cagtccattttatctttgaa

SEQ ID NO: 56001 - DNA, 20 bp, synthetic construct
  misc_feature 1..20: note = chemically synthesized
  source 1..20: mol_type = other DNA
gaacggaattgattgctgaa

SEQ ID NO: 56002 - DNA, 20 bp, synthetic construct
  misc_feature 1..20: note = chemically synthesized
  source 1..20: mol_type = other DNA
cttccttgtctgtgtgaaac

SEQ ID NO: 56003 - DNA, 20 bp, synthetic construct
  misc_feature 1..20: note = chemically synthesized
  source 1..20: mol_type = other DNA
ctaatactgtctatttttct

SEQ ID NO: 56004 - DNA, 20 bp, synthetic construct
  misc_feature 1..20: note = chemically synthesized
  source 1..20: mol_type = other DNA
atttttctcagttctttctg

SEQ ID NO: 56005 - DNA, 20 bp, synthetic construct
  misc_feature 1..20: note = chemically synthesized
  source 1..20: mol_type = other DNA
tttttctcagttctttctgc

SEQ ID NO: 56006 - DNA, 20 bp, synthetic construct
  misc_feature 1..20: note = chemically synthesized
  source 1..20: mol_type = other DNA
tttctcagttctttctgcag

SEQ ID NO: 56007 - DNA, 20 bp, synthetic construct
  misc_feature 1..20: note = chemically synthesized
  source 1..20: mol_type = other DNA
tcagttctttctgcaggagt

SEQ ID NO: 56008 - DNA, 20 bp, synthetic construct
  misc_feature 1..20: note = chemically synthesized
  source 1..20: mol_type = other DNA
ttctttctgcaggagttagt

SEQ ID NO: 56009 - DNA, 20 bp, synthetic construct
  misc_feature 1..20: note = chemically synthesized
  source 1..20: mol_type = other DNA
gagttagtaagtgatgaatc

SEQ ID NO: 56010 - DNA, 20 bp, synthetic construct
  misc_feature 1..20: note = chemically synthesized
  source 1..20: mol_type = other DNA
ctctgtcacacatttgaaca

SEQ ID NO: 56011 - DNA, 20 bp, synthetic construct
  misc_feature 1..20: note = chemically synthesized
  source 1..20: mol_type = other DNA
ctctctaacctaaacattcc

SEQ ID NO: 56012 - DNA, 20 bp, synthetic construct
  misc_feature 1..20: note = chemically synthesized
  source 1..20: mol_type = other DNA
tctctaacctaaacattccc

SEQ ID NO: 56013 - DNA, 20 bp, synthetic construct
  misc_feature 1..20: note = chemically synthesized
  source 1..20: mol_type = other DNA
cccaggtttttcatgtgata

SEQ ID NO: 56014 - DNA, 20 bp, synthetic construct
  misc_feature 1..20: note = chemically synthesized
  source 1..20: mol_type = other DNA
ttttcatgtgatatggcttc

SEQ ID NO: 56015 - DNA, 20 bp, synthetic construct
  misc_feature 1..20: note = chemically synthesized
  source 1..20: mol_type = other DNA
tttcatgtgatatggcttcc

SEQ ID NO: 56016 - DNA, 20 bp, synthetic construct
  misc_feature 1..20: note = chemically synthesized
  source 1..20: mol_type = other DNA
tccaggttcttcctcaaaca

SEQ ID NO: 56017 - DNA, 20 bp, synthetic construct
  misc_feature 1..20: note = chemically synthesized
  source 1..20: mol_type = other DNA
tcttcctcaaacatggaacc

SEQ ID NO: 56018 - DNA, 20 bp, synthetic construct
  misc_feature 1..20: note = chemically synthesized
  source 1..20: mol_type = other DNA
gttccgttcttacaaatctc

SEQ ID NO: 56019 - DNA, 20 bp, synthetic construct
  misc_feature 1..20: note = chemically synthesized
  source 1..20: mol_type = other DNA
ttccgttcttacaaatctcc

SEQ ID NO: 56020 - DNA, 20 bp, synthetic construct
  misc_feature 1..20: note = chemically synthesized
  source 1..20: mol_type = other DNA
tccgttcttacaaatctcca

SEQ ID NO: 56021 - DNA, 20 bp, synthetic construct
  misc_feature 1..20: note = chemically synthesized
  source 1..20: mol_type = other DNA
ccgttcttacaaatctccag

SEQ ID NO: 56022 - DNA, 20 bp, synthetic construct
  misc_feature 1..20: note = chemically synthesized
  source 1..20: mol_type = other DNA
gttcttacaaatctccaggg

SEQ ID NO: 56023 - DNA, 20 bp, synthetic construct
  misc_feature 1..20: note = chemically synthesized
  source 1..20: mol_type = other DNA
tctccaggggagaaattcca

SEQ ID NO: 56024 - DNA, 20 bp, synthetic construct
  misc_feature 1..20: note = chemically synthesized
  source 1..20: mol_type = other DNA
agaaattccacagttttgtt

SEQ ID NO: 56025 - DNA, 20 bp, synthetic construct
  misc_feature 1..20: note = chemically synthesized
  source 1..20: mol_type = other DNA
gaaattccacagttttgtta

SEQ ID NO: 56026 - DNA, 20 bp, synthetic construct
  misc_feature 1..20: note = chemically synthesized
  source 1..20: mol_type = other DNA
tttgttaaggtcttatattc

SEQ ID NO: 56027 - DNA, 20 bp, synthetic construct
  misc_feature 1..20: note = chemically synthesized
  source 1..20: mol_type = other DNA
cttgtcttacccttgttaat

SEQ ID NO: 56028 - DNA, 20 bp, synthetic construct
  misc_feature 1..20: note = chemically synthesized
  source 1..20: mol_type = other DNA
tacccttgttaattggatct

SEQ ID NO: 56029 - DNA, 20 bp, synthetic construct
  misc_feature 1..20: note = chemically synthesized
  source 1..20: mol_type = other DNA
gatctaagaaaacacatatt

SEQ ID NO: 56030 - DNA, 20 bp, synthetic construct
  misc_feature 1..20: note = chemically synthesized
  source 1..20: mol_type = other DNA
atctaagaaaacacatattc

SEQ ID NO: 56031 - DNA, 20 bp, synthetic construct
  misc_feature 1..20: note = chemically synthesized
  source 1..20: mol_type = other DNA
taagaaaacacatattcagg

SEQ ID NO: 56032 - DNA, 20 bp, synthetic construct
  misc_feature 1..20: note = chemically synthesized
  source 1..20: mol_type = other DNA
aagaaaacacatattcaggc

SEQ ID NO: 56033 - DNA, 20 bp, synthetic construct
  misc_feature 1..20: note = chemically synthesized
  source 1..20: mol_type = other DNA
agaaaacacatattcaggca

SEQ ID NO: 56034 - DNA, 20 bp, synthetic construct
  misc_feature 1..20: note = chemically synthesized
  source 1..20: mol_type = other DNA
acacatattcaggcagggtg

SEQ ID NO: 56035 - DNA, 20 bp, synthetic construct
  misc_feature 1..20: note = chemically synthesized
  source 1..20: mol_type = other DNA
catattcaggcagggtgcgg

SEQ ID NO: 56036 - DNA, 20 bp, synthetic construct
  misc_feature 1..20: note = chemically synthesized
  source 1..20: mol_type = other DNA
gtggctcacccttgtaatcc

SEQ ID NO: 56037 - DNA, 20 bp, synthetic construct
  misc_feature 1..20: note = chemically synthesized
  source 1..20: mol_type = other DNA
cccttgtaatcccagcgctt

SEQ ID NO: 56038 - DNA, 20 bp, synthetic construct
  misc_feature 1..20: note = chemically synthesized
  source 1..20: mol_type = other DNA
ccttgtaatcccagcgcttt

SEQ ID NO: 56039 - DNA, 20 bp, synthetic construct
  misc_feature 1..20: note = chemically synthesized
  source 1..20: mol_type = other DNA
ttgtaatcccagcgctttgg

SEQ ID NO: 56040 - DNA, 20 bp, synthetic construct
  misc_feature 1..20: note = chemically synthesized
  source 1..20: mol_type = other DNA
tgtaatcccagcgctttggg

SEQ ID NO: 56041 - DNA, 20 bp, synthetic construct
  misc_feature 1..20: note = chemically synthesized
  source 1..20: mol_type = other DNA
tcccagcgctttgggaggcc

SEQ ID NO: 56042 - DNA, 20 bp, synthetic construct
  misc_feature 1..20: note = chemically synthesized
  source 1..20: mol_type = other DNA
cccagcgctttgggaggccg

SEQ ID NO: 56043 - DNA, 20 bp, synthetic construct
  misc_feature 1..20: note = chemically synthesized
  source 1..20: mol_type = other DNA
agcgctttgggaggccgagg

SEQ ID NO: 56044 - DNA, 20 bp, synthetic construct
  misc_feature 1..20: note = chemically synthesized
  source 1..20: mol_type = other DNA
gcgctttgggaggccgaggc

SEQ ID NO: 56045 - DNA, 20 bp, synthetic construct
  misc_feature 1..20: note = chemically synthesized
  source 1..20: mol_type = other DNA
ctttgggaggccgaggcggg

SEQ ID NO: 56046 - DNA, 20 bp, synthetic construct
  misc_feature 1..20: note = chemically synthesized
  source 1..20: mol_type = other DNA
ggccgaggcgggcggatcac

SEQ ID NO: 56047 - DNA, 20 bp, synthetic construct
  misc_feature 1..20: note = chemically synthesized
  source 1..20: mol_type = other DNA
gccgaggcgggcggatcacg

SEQ ID NO: 56048 - DNA, 20 bp, synthetic construct
  misc_feature 1..20: note = chemically synthesized
  source 1..20: mol_type = other DNA
aggcgggcggatcacgaggt

SEQ ID NO: 56049 - DNA, 20 bp, synthetic construct
  misc_feature 1..20: note = chemically synthesized
  source 1..20: mol_type = other DNA
ggcgggcggatcacgaggtc

SEQ ID NO: 56050 - DNA, 20 bp, synthetic construct
  misc_feature 1..20: note = chemically synthesized
  source 1..20: mol_type = other DNA
cgggcggatcacgaggtcag

SEQ ID NO: 56051 - DNA, 20 bp, synthetic construct
  misc_feature 1..20: note = chemically synthesized
  source 1..20: mol_type = other DNA
gatcacgaggtcaggagatc

SEQ ID NO: 56052 - DNA, 20 bp, synthetic construct
  misc_feature 1..20: note = chemically synthesized
  source 1..20: mol_type = other DNA
aggtcaggagatcaagacca

SEQ ID NO: 56053 - DNA, 20 bp, synthetic construct
  misc_feature 1..20: note = chemically synthesized
  source 1..20: mol_type = other DNA
ctgctaaaaatacaaaaaat

SEQ ID NO: 56054 - DNA, 20 bp, synthetic construct
  misc_feature 1..20: note = chemically synthesized
  source 1..20: mol_type = other DNA
taaaaatacaaaaaattagc

SEQ ID NO: 56055 - DNA, 20 bp, synthetic construct
  misc_feature 1..20: note = chemically synthesized
  source 1..20: mol_type = other DNA
aaaaatacaaaaaattagcc

SEQ ID NO: 56056 - DNA, 20 bp, synthetic construct
  misc_feature 1..20: note = chemically synthesized
  source 1..20: mol_type = other DNA
tacaaaaaattagccgggca

SEQ ID NO: 56057 - DNA, 20 bp, synthetic construct
  misc_feature 1..20: note = chemically synthesized
  source 1..20: mol_type = other DNA
aaaaaattagccgggcatgg

SEQ ID NO: 56058 - DNA, 20 bp, synthetic construct
  misc_feature 1..20: note = chemically synthesized
  source 1..20: mol_type = other DNA
aaattagccgggcatggtgg

SEQ ID NO: 56059 - DNA, 20 bp, synthetic construct
  misc_feature 1..20: note = chemically synthesized
  source 1..20: mol_type = other DNA
aattagccgggcatggtggc

SEQ ID NO: 56060 - DNA, 20 bp, synthetic construct
  misc_feature 1..20: note = chemically synthesized
  source 1..20: mol_type = other DNA
ggcatggtggcgggcgcctg

SEQ ID NO: 56061 - DNA, 20 bp, synthetic construct
  misc_feature 1..20: note = chemically synthesized
  source 1..20: mol_type = other DNA
gtggcgggcgcctgtagtcc

SEQ ID NO: 56062 - DNA, 20 bp, synthetic construct
  misc_feature 1..20: note = chemically synthesized
  source 1..20: mol_type = other DNA
cgcctgtagtcccagctact

SEQ ID NO: 56063 - DNA, 20 bp, synthetic construct
  misc_feature 1..20: note = chemically synthesized
  source 1..20: mol_type = other DNA
cctgtagtcccagctactcg

SEQ ID NO: 56064 - DNA, 20 bp, synthetic construct
  misc_feature 1..20: note = chemically synthesized
  source 1..20: mol_type = other DNA
tgtagtcccagctactcgga

SEQ ID NO: 56065 - DNA, 20 bp, synthetic construct
  misc_feature 1..20: note = chemically synthesized
  source 1..20: mol_type = other DNA
gtagtcccagctactcggag

SEQ ID NO: 56066 - DNA, 20 bp, synthetic construct
  misc_feature 1..20: note = chemically synthesized
  source 1..20: mol_type = other DNA
cccagctactcggagaggct

SEQ ID NO: 56067 - DNA, 20 bp, synthetic construct
  misc_feature 1..20: note = chemically synthesized
  source 1..20: mol_type = other DNA
ccagctactcggagaggctg

SEQ ID NO: 56068 - DNA, 20 bp, synthetic construct
  misc_feature 1..20: note = chemically synthesized
  source 1..20: mol_type = other DNA
gctactcggagaggctgagg

SEQ ID NO: 56069 - DNA, 20 bp, synthetic construct
  misc_feature 1..20: note = chemically synthesized
  source 1..20: mol_type = other DNA
ctactcggagaggctgaggc

SEQ ID NO: 56070 - DNA, 20 bp, synthetic construct
  misc_feature 1..20: note = chemically synthesized
  source 1..20: mol_type = other DNA
actcggagaggctgaggcag

SEQ ID NO: 56071 - DNA, 20 bp, synthetic construct
  misc_feature 1..20: note = chemically synthesized
  source 1..20: mol_type = other DNA
gagaggctgaggcaggagaa

SEQ ID NO: 56072 - DNA, 20 bp, synthetic construct
  misc_feature 1..20: note = chemically synthesized
  source 1..20: mol_type = other DNA
gcaggagaatggcgtgaacc

SEQ ID NO: 56073 - DNA, 20 bp, synthetic construct
  misc_feature 1..20: note = chemically synthesized
  source 1..20: mol_type = other DNA
caggagaatggcgtgaaccc

SEQ ID NO: 56074 - DNA, 20 bp, synthetic construct
  misc_feature 1..20: note = chemically synthesized
  source 1..20: mol_type = other DNA
ggagaatggcgtgaacccag

SEQ ID NO: 56075 - DNA, 20 bp, synthetic construct
  misc_feature 1..20: note = chemically synthesized
  source 1..20: mol_type = other DNA
gagaatggcgtgaacccagg

SEQ ID NO: 56076 - DNA, 20 bp, synthetic construct
  misc_feature 1..20: note = chemically synthesized
  source 1..20: mol_type = other DNA
aatggcgtgaacccaggagg

SEQ ID NO: 56077 - DNA, 20 bp, synthetic construct
  misc_feature 1..20: note = chemically synthesized
  source 1..20: mol_type = other DNA
tggcgtgaacccaggaggtg

SEQ ID NO: 56078 - DNA, 20 bp, synthetic construct
  misc_feature 1..20: note = chemically synthesized
  source 1..20: mol_type = other DNA
aacccaggaggtggagcttg

SEQ ID NO: 56079 - DNA, 20 bp, synthetic construct
  misc_feature 1..20: note = chemically synthesized
  source 1..20: mol_type = other DNA
caggaggtggagcttgcagt

SEQ ID NO: 56080 - DNA, 20 bp, synthetic construct
  misc_feature 1..20: note = chemically synthesized
  source 1..20: mol_type = other DNA
ggtggagcttgcagtgagcc

SEQ ID NO: 56081 - DNA, 20 bp, synthetic construct
  misc_feature 1..20: note = chemically synthesized
  source 1..20: mol_type = other DNA
gagatcgcaccactgcactc

SEQ ID NO: 56082 - DNA, 20 bp, synthetic construct
  misc_feature 1..20: note = chemically synthesized
  source 1..20: mol_type = other DNA
cgcaccactgcactctagcc

SEQ ID NO: 56083 - DNA, 20 bp, synthetic construct
  misc_feature 1..20: note = chemically synthesized
  source 1..20: mol_type = other DNA
gcaccactgcactctagcct

SEQ ID NO: 56084 - DNA, 20 bp, synthetic construct
  misc_feature 1..20: note = chemically synthesized
  source 1..20: mol_type = other DNA
ctgcactctagcctgggtca

SEQ ID NO: 56085 - DNA, 20 bp, synthetic construct
  misc_feature 1..20: note = chemically synthesized
  source 1..20: mol_type = other DNA
gcactctagcctgggtcaca

SEQ ID NO: 56086 - DNA, 20 bp, synthetic construct
  misc_feature 1..20: note = chemically synthesized
  source 1..20: mol_type = other DNA
tctagcctgggtcacagagc

SEQ ID NO: 56087 - DNA, 20 bp, synthetic construct
  misc_feature 1..20: note = chemically synthesized
  source 1..20: mol_type = other DNA
tcaaaactctgaacctataa

SEQ ID NO: 56088 - DNA, 20 bp, synthetic construct
  misc_feature 1..20: note = chemically synthesized
  source 1..20: mol_type = other DNA
aaaactctgaacctataaaa

SEQ ID NO: 56089 - DNA, 20 bp, synthetic construct
  misc_feature 1..20: note = chemically synthesized
  source 1..20: mol_type = other DNA
cctataaaagagatcaactg

SEQ ID NO: 56090 - DNA, 20 bp, synthetic construct
  misc_feature 1..20: note = chemically synthesized
  source 1..20: mol_type = other DNA
gatcaactgcagttatctat

SEQ ID NO: 56091 - DNA, 20 bp, synthetic construct
  misc_feature 1..20: note = chemically synthesized
  source 1..20: mol_type = other DNA
atcaactgcagttatctatt

SEQ ID NO: 56092 - DNA, 20 bp, synthetic construct
  misc_feature 1..20: note = chemically synthesized
  source 1..20: mol_type = other DNA
aatgaatgtatttaaatgaa

SEQ ID NO: 56093 - DNA, 20 bp, synthetic construct
  misc_feature 1..20: note = chemically synthesized
  source 1..20: mol_type = other DNA
atttaaatgaacagctttcc

SEQ ID NO: 56094 - DNA, 20 bp, synthetic construct
  misc_feature 1..20: note = chemically synthesized
  source 1..20: mol_type = other DNA
tttaaatgaacagctttcct

SEQ ID NO: 56095 - DNA, 20 bp, synthetic construct
  misc_feature 1..20: note = chemically synthesized
  source 1..20: mol_type = other DNA
tcgtgttaatttgttaaatt

SEQ ID NO: 56096 - DNA, 20 bp, synthetic construct
  misc_feature 1..20: note = chemically synthesized
  source 1..20: mol_type = other DNA
tgttaatttgttaaatttgg

SEQ ID NO: 56097 - DNA, 20 bp, synthetic construct
  misc_feature 1..20: note = chemically synthesized
  source 1..20: mol_type = other DNA
aatttggcagattccctgaa

SEQ ID NO: 56098 - DNA, 20 bp, synthetic construct
  misc_feature 1..20: note = chemically synthesized
  source 1..20: mol_type = other DNA
agattccctgaaaagtaaat

SEQ ID NO: 56099 - DNA, 20 bp, synthetic construct
  misc_feature 1..20: note = chemically synthesized
  source 1..20: mol_type = other DNA
gattccctgaaaagtaaatt

SEQ ID NO: 56100 - DNA, 20 bp, synthetic construct
  misc_feature 1..20: note = chemically synthesized
  source 1..20: mol_type = other DNA
attccctgaaaagtaaatta

SEQ ID NO: 56101 - DNA, 20 bp, synthetic construct
  misc_feature 1..20: note = chemically synthesized
  source 1..20: mol_type = other DNA
aagtaaattagggcctgttg

SEQ ID NO: 56102 - DNA, 20 bp, synthetic construct
  misc_feature 1..20: note = chemically synthesized
  source 1..20: mol_type = other DNA
aattagggcctgttgaagac

SEQ ID NO: 56103 - DNA, 20 bp, synthetic construct
  misc_feature 1..20: note = chemically synthesized
  source 1..20: mol_type = other DNA
agggcctgttgaagaccagt

SEQ ID NO: 56104 - DNA, 20 bp, synthetic construct
  misc_feature 1..20: note = chemically synthesized
  source 1..20: mol_type = other DNA
ttgaagaccagtaagaaata

SEQ ID NO: 56105 - DNA, 20 bp, synthetic construct
  misc_feature 1..20: note = chemically synthesized
  source 1..20: mol_type = other DNA
taagaaataaagattgtaaa

SEQ ID NO: 56106 - DNA, 20 bp, synthetic construct
  misc_feature 1..20: note = chemically synthesized
  source 1..20: mol_type = other DNA
taaagattgtaaaaagctct

SEQ ID NO: 56107 - DNA, 20 bp, synthetic construct
  misc_feature 1..20: note = chemically synthesized
  source 1..20: mol_type = other DNA
gtaaaaagctctgagatttc

SEQ ID NO: 56108 - DNA, 20 bp, synthetic construct
  misc_feature 1..20: note = chemically synthesized
  source 1..20: mol_type = other DNA
gatttcaagctaattcaatt

SEQ ID NO: 56109 - DNA, 20 bp, synthetic construct
  misc_feature 1..20: note = chemically synthesized
  source 1..20: mol_type = other DNA
tggtgcgttaatttgatgta

SEQ ID NO: 56110 - DNA, 20 bp, synthetic construct
  misc_feature 1..20: note = chemically synthesized
  source 1..20: mol_type = other DNA
cttctacacaattcattcta

SEQ ID NO: 56111 - DNA, 20 bp, synthetic construct
  misc_feature 1..20: note = chemically synthesized
  source 1..20: mol_type = other DNA
cacaattcattctatagatc

SEQ ID NO: 56112 - DNA, 20 bp, synthetic construct
  misc_feature 1..20: note = chemically synthesized
  source 1..20: mol_type = other DNA
acaattcattctatagatct

SEQ ID NO: 56113 - DNA, 20 bp, synthetic construct
  misc_feature 1..20: note = chemically synthesized
  source 1..20: mol_type = other DNA
tatagatctgggcactctta

SEQ ID NO: 56114 - DNA, 20 bp, synthetic construct
  misc_feature 1..20: note = chemically synthesized
  source 1..20: mol_type = other DNA
ttatagaaattaatcatttc

SEQ ID NO: 56115 - DNA, 20 bp, synthetic construct
  misc_feature 1..20: note = chemically synthesized
  source 1..20: mol_type = other DNA
cattcttgactttcaaccca

SEQ ID NO: 56116 - DNA, 20 bp, synthetic construct
  misc_feature 1..20: note = chemically synthesized
  source 1..20: mol_type = other DNA
tcaacccacagaaatgctaa

SEQ ID NO: 56117 - DNA, 20 bp, synthetic construct
  misc_feature 1..20: note = chemically synthesized
  source 1..20: mol_type = other DNA
ctaacagtactgattacaca

SEQ ID NO: 56118 - DNA, 20 bp, synthetic construct
  misc_feature 1..20: note = chemically synthesized
  source 1..20: mol_type = other DNA
taacagtactgattacacac

SEQ ID NO: 56119 - DNA, 20 bp, synthetic construct
  misc_feature 1..20: note = chemically synthesized
  source 1..20: mol_type = other DNA
tactgattacacacaggatg

SEQ ID NO: 56120 - DNA, 20 bp, synthetic construct
  misc_feature 1..20: note = chemically synthesized
  source 1..20: mol_type = other DNA
gattacacacaggatgtggc

SEQ ID NO: 56121 - DNA, 20 bp, synthetic construct
  misc_feature 1..20: note = chemically synthesized
  source 1..20: mol_type = other DNA
acaggatgtggctggaatgc

SEQ ID NO: 56122 - DNA, 20 bp, synthetic construct
  misc_feature 1..20: note = chemically synthesized
  source 1..20: mol_type = other DNA
caggatgtggctggaatgct

SEQ ID NO: 56123 - DNA, 20 bp, synthetic construct
  misc_feature 1..20: note = chemically synthesized
  source 1..20: mol_type = other DNA
tgctgggattttgtcctgat

SEQ ID NO: 56124 - DNA, 20 bp, synthetic construct
  misc_feature 1..20: note = chemically synthesized
  source 1..20: mol_type = other DNA
gctgggattttgtcctgatt

SEQ ID NO: 56125 - DNA, 20 bp, synthetic construct
  misc_feature 1..20: note = chemically synthesized
  source 1..20: mol_type = other DNA
ctgggattttgtcctgatta

SEQ ID NO: 56126 - DNA, 20 bp, synthetic construct
  misc_feature 1..20: note = chemically synthesized
  source 1..20: mol_type = other DNA
gggattttgtcctgattagg

SEQ ID NO: 56127 - DNA, 20 bp, synthetic construct
  misc_feature 1..20: note = chemically synthesized
  source 1..20: mol_type = other DNA
gattttgtcctgattaggga

SEQ ID NO: 56128 - DNA, 20 bp, synthetic construct
  misc_feature 1..20: note = chemically synthesized
  source 1..20: mol_type = other DNA
gtcctgattagggagagaaa

SEQ ID NO: 56129 - DNA, 20 bp, synthetic construct
  misc_feature 1..20: note = chemically synthesized
  source 1..20: mol_type = other DNA
gattagggagagaaacggaa

SEQ ID NO: 56130 - DNA, 20 bp, synthetic construct
  misc_feature 1..20: note = chemically synthesized
  source 1..20: mol_type = other DNA
attagggagagaaacggaat

SEQ ID NO: 56131 - DNA, 20 bp, synthetic construct
  misc_feature 1..20: note = chemically synthesized
  source 1..20: mol_type = other DNA
ttagggagagaaacggaatg

SEQ ID NO: 56132 - DNA, 20 bp, synthetic construct
  misc_feature 1..20: note = chemically synthesized
  source 1..20: mol_type = other DNA
gagagaaacggaatggggtt

SEQ ID NO: 56133 - DNA, 20 bp, synthetic construct
  misc_feature 1..20: note = chemically synthesized
  source 1..20: mol_type = other DNA
agagaaacggaatggggttt

SEQ ID NO: 56134 - DNA, 20 bp, synthetic construct
  misc_feature 1..20: note = chemically synthesized
  source 1..20: mol_type = other DNA
gagaaacggaatggggtttg

SEQ ID NO: 56135 - DNA, 20 bp, synthetic construct
  misc_feature 1..20: note = chemically synthesized
  source 1..20: mol_type = other DNA
agaaacggaatggggtttgg

SEQ ID NO: 56136 - DNA, 20 bp, synthetic construct
  misc_feature 1..20: note = chemically synthesized
  source 1..20: mol_type = other DNA
aaacggaatggggtttgggg

SEQ ID NO: 56137 - DNA, 20 bp, synthetic construct
  misc_feature 1..20: note = chemically synthesized
  source 1..20: mol_type = other DNA
cggaatggggtttgggggag

SEQ ID NO: 56138 - DNA, 20 bp, synthetic construct
  misc_feature 1..20: note = chemically synthesized
  source 1..20: mol_type = other DNA
ggaatggggtttgggggaga

SEQ ID NO: 56139 - DNA, 20 bp, synthetic construct
  misc_feature 1..20: note = chemically synthesized
  source 1..20: mol_type = other DNA
atggggtttgggggagaagg

SEQ ID NO: 56140 - DNA, 20 bp, synthetic construct
  misc_feature 1..20: note = chemically synthesized
  source 1..20: mol_type = other DNA
tggggtttgggggagaagga

SEQ ID NO: 56141 - DNA, 20 bp, synthetic construct
  misc_feature 1..20: note = chemically synthesized
  source 1..20: mol_type = other DNA
ggggtttgggggagaaggaa

SEQ ID NO: 56142 - DNA, 20 bp, synthetic construct
  misc_feature 1..20: note = chemically synthesized
  source 1..20: mol_type = other DNA
ggtttgggggagaaggaagg

SEQ ID NO: 56143 - DNA, 20 bp, synthetic construct
  misc_feature 1..20: note = chemically synthesized
  source 1..20: mol_type = other DNA
tgggggagaaggaagggagt

SEQ ID NO: 56144 - DNA, 20 bp, synthetic construct
  misc_feature 1..20: note = chemically synthesized
  source 1..20: mol_type = other DNA
gagaaggaagggagtcagat

SEQ ID NO: 56145 - DNA, 20 bp, synthetic construct
  misc_feature 1..20: note = chemically synthesized
  source 1..20: mol_type = other DNA
tcagatcagcccatacctga

SEQ ID NO: 56146 - DNA, 20 bp, synthetic construct
  misc_feature 1..20: note = chemically synthesized
  source 1..20: mol_type = other DNA
cagatcagcccatacctgac

SEQ ID NO: 56147 - DNA, 20 bp, synthetic construct
  misc_feature 1..20: note = chemically synthesized
  source 1..20: mol_type = other DNA
gcccatacctgacaggactc

SEQ ID NO: 56148 - DNA, 20 bp, synthetic construct
  misc_feature 1..20: note = chemically synthesized
  source 1..20: mol_type = other DNA
gactccagcaacaacttgat

SEQ ID NO: 56149 - DNA, 20 bp, synthetic construct
  misc_feature 1..20: note = chemically synthesized
  source 1..20: mol_type = other DNA
actccagcaacaacttgatg

SEQ ID NO: 56150 - DNA, 20 bp, synthetic construct
  misc_feature 1..20: note = chemically synthesized
  source 1..20: mol_type = other DNA
aacaacttgatgaggaaaat

SEQ ID NO: 56151 - DNA, 20 bp, synthetic construct
  misc_feature 1..20: note = chemically synthesized
  source 1..20: mol_type = other DNA
aacttgatgaggaaaatgag

SEQ ID NO: 56152 - DNA, 20 bp, synthetic construct
  misc_feature 1..20: note = chemically synthesized
  source 1..20: mol_type = other DNA
tgatgaggaaaatgagcagc

SEQ ID NO: 56153 - DNA, 20 bp, synthetic construct
  misc_feature 1..20: note = chemically synthesized
  source 1..20: mol_type = other DNA
gatgaggaaaatgagcagca

SEQ ID NO: 56154 - DNA, 20 bp, synthetic construct
  misc_feature 1..20: note = chemically synthesized
  source 1..20: mol_type = other DNA
gaggaaaatgagcagcaagg

SEQ ID NO: 56155 - DNA, 20 bp, synthetic construct
  misc_feature 1..20: note = chemically synthesized
  source 1..20: mol_type = other DNA
gcagcaaggtagattcgtga

SEQ ID NO: 56156 - DNA, 20 bp, synthetic construct
  misc_feature 1..20: note = chemically synthesized
  source 1..20: mol_type = other DNA
caaggtagattcgtgacaga

SEQ ID NO: 56157 - DNA, 20 bp, synthetic construct
  misc_feature 1..20: note = chemically synthesized
  source 1..20: mol_type = other DNA
attcgtgacagacagacatt

SEQ ID NO: 56158 - DNA, 20 bp, synthetic construct
  misc_feature 1..20: note = chemically synthesized
  source 1..20: mol_type = other DNA
cagacagacattcagctgca

SEQ ID NO: 56159 - DNA, 20 bp, synthetic construct
  misc_feature 1..20: note = chemically synthesized
  source 1..20: mol_type = other DNA
agacattcagctgcacagcc

SEQ ID NO: 56160 - DNA, 20 bp, synthetic construct
  misc_feature 1..20: note = chemically synthesized
  source 1..20: mol_type = other DNA
ccaaccacaaaatgacattc

SEQ ID NO: 56161 - DNA, 20 bp, synthetic construct
  misc_feature 1..20: note = chemically synthesized
  source 1..20: mol_type = other DNA
tgacattcaagcacctgcaa

SEQ ID NO: 56162 - DNA, 20 bp, synthetic construct
  misc_feature 1..20: note = chemically synthesized
  source 1..20: mol_type = other DNA
cattcaagcacctgcaacag

SEQ ID NO: 56163 - DNA, 20 bp, synthetic construct
  misc_feature 1..20: note = chemically synthesized
  source 1..20: mol_type = other DNA
ttcaagcacctgcaacagaa

SEQ ID NO: 56164 - DNA, 20 bp, synthetic construct
  misc_feature 1..20: note = chemically synthesized
  source 1..20: mol_type = other DNA
tcaagcacctgcaacagaag

SEQ ID NO: 56165 - DNA, 20 bp, synthetic construct
  misc_feature 1..20: note = chemically synthesized
  source 1..20: mol_type = other DNA
aacagaagaggcaaccataa

SEQ ID NO: 56166 - DNA, 20 bp, synthetic construct
  misc_feature 1..20: note = chemically synthesized
  source 1..20: mol_type = other DNA
gaggcaaccataacagaaca

SEQ ID NO: 56167 - DNA, 20 bp, synthetic construct
  misc_feature 1..20: note = chemically synthesized
  source 1..20: mol_type = other DNA
aggcaaccataacagaacac

SEQ ID NO: 56168 - DNA, 20 bp, synthetic construct
  misc_feature 1..20: note = chemically synthesized
  source 1..20: mol_type = other DNA
accataacagaacacaggtg

SEQ ID NO: 56169 - DNA, 20 bp, synthetic construct
  misc_feature 1..20: note = chemically synthesized
  source 1..20: mol_type = other DNA
gaacacaggtgcagatcctt

SEQ ID NO: 56170 - DNA, 20 bp, synthetic construct
  misc_feature 1..20: note = chemically synthesized
  source 1..20: mol_type = other DNA
caggtgcagatccttcagca

SEQ ID NO: 56171 - DNA, 20 bp, synthetic construct
  misc_feature 1..20: note = chemically synthesized
  source 1..20: mol_type = other DNA
agatccttcagcaaagaaaa

SEQ ID NO: 56172 - DNA, 20 bp, synthetic construct
  misc_feature 1..20: note = chemically synthesized
  source 1..20: mol_type = other DNA
agcaaagaaaacagcccctg

SEQ ID NO: 56173 - DNA, 20 bp, synthetic construct
  misc_feature 1..20: note = chemically synthesized
  source 1..20: mol_type = other DNA
aacagcccctgcagaaatgt

SEQ ID NO: 56174 - DNA, 20 bp, synthetic construct
  misc_feature 1..20: note = chemically synthesized
  source 1..20: mol_type = other DNA
cagcccctgcagaaatgttg

SEQ ID NO: 56175 - DNA, 20 bp, synthetic construct
  misc_feature 1..20: note = chemically synthesized
  source 1..20: mol_type = other DNA
cctgcagaaatgttggagcc

SEQ ID NO: 56176 - DNA, 20 bp, synthetic construct
  misc_feature 1..20: note = chemically synthesized
  source 1..20: mol_type = other DNA
atgttggagcctggcaaact

SEQ ID NO: 56177 - DNA, 20 bp, synthetic construct
  misc_feature 1..20: note = chemically synthesized
  source 1..20: mol_type = other DNA
tgttggagcctggcaaactt

SEQ ID NO: 56178 - DNA, 20 bp, synthetic construct
  misc_feature 1..20: note = chemically synthesized
  source 1..20: mol_type = other DNA
ctggcaaacttaggtgctct

SEQ ID NO: 56179 - DNA, 20 bp, synthetic construct
  misc_feature 1..20: note = chemically synthesized
  source 1..20: mol_type = other DNA
gcaaacttaggtgctctcag

SEQ ID NO: 56180 - DNA, 20 bp, synthetic construct
  misc_feature 1..20: note = chemically synthesized
  source 1..20: mol_type = other DNA
agtggaatttttgtaaatta

SEQ ID NO: 56181 - DNA, 20 bp, synthetic construct
  misc_feature 1..20: note = chemically synthesized
  source 1..20: mol_type = other DNA
gaatttttgtaaattaaagc

SEQ ID NO: 56182 - DNA, 20 bp, synthetic construct
  misc_feature 1..20: note = chemically synthesized
  source 1..20: mol_type = other DNA
aaattaaagccagtactcaa

SEQ ID NO: 56183 - DNA, 20 bp, synthetic construct
  misc_feature 1..20: note = chemically synthesized
  source 1..20: mol_type = other DNA
agccagtactcaaaagtcca

SEQ ID NO: 56184 - DNA, 20 bp, synthetic construct
  misc_feature 1..20: note = chemically synthesized
  source 1..20: mol_type = other DNA
aaaagtccaaagatgcctgt

SEQ ID NO: 56185 - DNA, 20 bp, synthetic construct
  misc_feature 1..20: note = chemically synthesized
  source 1..20: mol_type = other DNA
aaagtccaaagatgcctgtt

SEQ ID NO: 56186 - DNA, 20 bp, synthetic construct
  misc_feature 1..20: note = chemically synthesized
  source 1..20: mol_type = other DNA
aagtccaaagatgcctgttg

SEQ ID NO: 56187 - DNA, 20 bp, synthetic construct
  misc_feature 1..20: note = chemically synthesized
  source 1..20: mol_type = other DNA
agtccaaagatgcctgttgg

SEQ ID NO: 56188 - DNA, 20 bp, synthetic construct
  misc_feature 1..20: note = chemically synthesized
  source 1..20: mol_type = other DNA
caaagatgcctgttgggggc

SEQ ID NO: 56189 - DNA, 20 bp, synthetic construct
  misc_feature 1..20: note = chemically synthesized
  source 1..20: mol_type = other DNA
aaagatgcctgttgggggct

SEQ ID NO: 56190 - DNA, 20 bp, synthetic construct
  misc_feature 1..20: note = chemically synthesized
  source 1..20: mol_type = other DNA
tgcctgttgggggctgggtg

SEQ ID NO: 56191 - DNA, 20 bp, synthetic construct
  misc_feature 1..20: note = chemically synthesized
  source 1..20: mol_type = other DNA
ctgttgggggctgggtgcag

SEQ ID NO: 56192 - DNA, 20 bp, synthetic construct
  misc_feature 1..20: note = chemically synthesized
  source 1..20: mol_type = other DNA
gggggctgggtgcagcggct

SEQ ID NO: 56193 - DNA, 20 bp, synthetic construct
  misc_feature 1..20: note = chemically synthesized
  source 1..20: mol_type = other DNA
gacctgtaatcccaatactt

SEQ ID NO: 56194 - DNA, 20 bp, synthetic construct
  misc_feature 1..20: note = chemically synthesized
  source 1..20: mol_type = other DNA
acctgtaatcccaatacttt

SEQ ID NO: 56195 - DNA, 20 bp, synthetic construct
  misc_feature 1..20: note = chemically synthesized
  source 1..20: mol_type = other DNA
ctgtaatcccaatactttgg

SEQ ID NO: 56196 - DNA, 20 bp, synthetic construct
  misc_feature 1..20: note = chemically synthesized
  source 1..20: mol_type = other DNA
tgtaatcccaatactttggg

SEQ ID NO: 56197 - DNA, 20 bp, synthetic construct
  misc_feature 1..20: note = chemically synthesized
  source 1..20: mol_type = other DNA
tcccaatactttgggaggcc

SEQ ID NO: 56198 - DNA, 20 bp, synthetic construct
  misc_feature 1..20: note = chemically synthesized
  source 1..20: mol_type = other DNA
cccaatactttgggaggccg

SEQ ID NO: 56199 - DNA, 20 bp, synthetic construct
  misc_feature 1..20: note = chemically synthesized
  source 1..20: mol_type = other DNA
atactttgggaggccgaggt

SEQ ID NO: 56200 - DNA, 20 bp, synthetic construct
  misc_feature 1..20: note = chemically synthesized
  source 1..20: mol_type = other DNA
actttgggaggccgaggtga

SEQ ID NO: 56201 - DNA, 20 bp, synthetic construct
  misc_feature 1..20: note = chemically synthesized
  source 1..20: mol_type = other DNA
ctttgggaggccgaggtgag

SEQ ID NO: 56202 - DNA, 20 bp, synthetic construct
  misc_feature 1..20: note = chemically synthesized
  source 1..20: mol_type = other DNA
ccgaggtgagaggatcactt

SEQ ID NO: 56203 - DNA, 20 bp, synthetic construct
  misc_feature 1..20: note = chemically synthesized
  source 1..20: mol_type = other DNA
cgaggtgagaggatcacttg

SEQ ID NO: 56204 - DNA, 20 bp, synthetic construct
  misc_feature 1..20: note = chemically synthesized
  source 1..20: mol_type = other DNA
gtgagaggatcacttgaggc

SEQ ID NO: 56205 - DNA, 20 bp, synthetic construct
  misc_feature 1..20: note = chemically synthesized
  source 1..20: mol_type = other DNA
tgagaggatcacttgaggcc

SEQ ID NO: 56206 - DNA, 20 bp, synthetic construct
  misc_feature 1..20: note = chemically synthesized
  source 1..20: mol_type = other DNA
agaggatcacttgaggccag

SEQ ID NO: 56207 - DNA, 20 bp, synthetic construct
  misc_feature 1..20: note = chemically synthesized
  source 1..20: mol_type = other DNA
tcacttgaggccaggagttc

SEQ ID NO: 56208 - DNA, 20 bp, synthetic construct
  misc_feature 1..20: note = chemically synthesized
  source 1..20: mol_type = other DNA
tgaggccaggagttcaagac

SEQ ID NO: 56209 - DNA, 20 bp, synthetic construct
  misc_feature 1..20: note = chemically synthesized
  source 1..20: mol_type = other DNA
ccaggagttcaagactagtc

SEQ ID NO: 56210 - DNA, 20 bp, synthetic construct
  misc_feature 1..20: note = chemically synthesized
  source 1..20: mol_type = other DNA
caggagttcaagactagtct

SEQ ID NO: 56211 - DNA, 20 bp, synthetic construct
  misc_feature 1..20: note = chemically synthesized
  source 1..20: mol_type = other DNA
caagactagtctgggcaaca

SEQ ID NO: 56212 - DNA, 20 bp, synthetic construct
  misc_feature 1..20: note = chemically synthesized
  source 1..20: mol_type = other DNA
actagtctgggcaacatagc

SEQ ID NO: 56213 - DNA, 20 bp, synthetic construct
  misc_feature 1..20: note = chemically synthesized
  source 1..20: mol_type = other DNA
agacccctgtctctttaaaa

SEQ ID NO: 56214 - DNA, 20 bp, synthetic construct
  misc_feature 1..20: note = chemically synthesized
  source 1..20: mol_type = other DNA
taaaaaagatcaaaattgac

SEQ ID NO: 56215 - DNA, 20 bp, synthetic construct
  misc_feature 1..20: note = chemically synthesized
  source 1..20: mol_type = other DNA
aaaaaagatcaaaattgacc

SEQ ID NO: 56216 - DNA, 20 bp, synthetic construct
  misc_feature 1..20: note = chemically synthesized
  source 1..20: mol_type = other DNA
agatcaaaattgaccaggca

SEQ ID NO: 56217 - DNA, 20 bp, synthetic construct
  misc_feature 1..20: note = chemically synthesized
  source 1..20: mol_type = other DNA
tcaaaattgaccaggcacgg

SEQ ID NO: 56218 - DNA, 20 bp, synthetic construct
  misc_feature 1..20: note = chemically synthesized
  source 1..20: mol_type = other DNA
gtggcttatgcttgtaatcc

SEQ ID NO: 56219 - DNA, 20 bp, synthetic construct
  misc_feature 1..20: note = chemically synthesized
  source 1..20: mol_type = other DNA
tgcttgtaatcccagcactt

SEQ ID NO: 56220 - DNA, 20 bp, synthetic construct
  misc_feature 1..20: note = chemically synthesized
  source 1..20: mol_type = other DNA
gcttgtaatcccagcacttt

SEQ ID NO: 56221 - DNA, 20 bp, synthetic construct
  misc_feature 1..20: note = chemically synthesized
  source 1..20: mol_type = other DNA
ttgtaatcccagcactttgg

SEQ ID NO: 56222 - DNA, 20 bp, synthetic construct
  misc_feature 1..20: note = chemically synthesized
  source 1..20: mol_type = other DNA
tgtaatcccagcactttggg

SEQ ID NO: 56223 - DNA, 20 bp, synthetic construct
  misc_feature 1..20: note = chemically synthesized
  source 1..20: mol_type = other DNA
tcccagcactttgggaggcc

SEQ ID NO: 56224 - DNA, 20 bp, synthetic construct
  misc_feature 1..20: note = chemically synthesized
  source 1..20: mol_type = other DNA
cccagcactttgggaggccg

SEQ ID NO: 56225 - DNA, 20 bp, synthetic construct
  misc_feature 1..20: note = chemically synthesized
  source 1..20: mol_type = other DNA
agcactttgggaggccgagg

SEQ ID NO: 56226 - DNA, 20 bp, synthetic construct
  misc_feature 1..20: note = chemically synthesized
  source 1..20: mol_type = other DNA
gcactttgggaggccgaggt

SEQ ID NO: 56227 - DNA, 20 bp, synthetic construct
  misc_feature 1..20: note = chemically synthesized
  source 1..20: mol_type = other DNA
ctttgggaggccgaggtggg

SEQ ID NO: 56228 - DNA, 20 bp, synthetic construct
  misc_feature 1..20: note = chemically synthesized
  source 1..20: mol_type = other DNA
ccgaggtgggtggatcactt

SEQ ID NO: 56229 - DNA, 20 bp, synthetic construct
  misc_feature 1..20: note = chemically synthesized
  source 1..20: mol_type = other DNA
cgaggtgggtggatcacttg

SEQ ID NO: 56230 - DNA, 20 bp, synthetic construct
  misc_feature 1..20: note = chemically synthesized
  source 1..20: mol_type = other DNA
gtgggtggatcacttgaggt

SEQ ID NO: 56231 - DNA, 20 bp, synthetic construct
  misc_feature 1..20: note = chemically synthesized
  source 1..20: mol_type = other DNA
tgggtggatcacttgaggtc

SEQ ID NO: 56232 - DNA, 20 bp, synthetic construct
  misc_feature 1..20: note = chemically synthesized
  source 1..20: mol_type = other DNA
ggtggatcacttgaggtcag

SEQ ID NO: 56233 - DNA, 20 bp, synthetic construct
  misc_feature 1..20: note = chemically synthesized
  source 1..20: mol_type = other DNA
tcacttgaggtcaggagttt

SEQ ID NO: 56234 - DNA, 20 bp, synthetic construct
  misc_feature 1..20: note = chemically synthesized
  source 1..20: mol_type = other DNA
tgaggtcaggagtttgagac

SEQ ID NO: 56235 - DNA, 20 bp, synthetic construct
  misc_feature 1..20: note = chemically synthesized
  source 1..20: mol_type = other DNA
tttgagaccagcctgatcaa

SEQ ID NO: 56236 - DNA, 20 bp, synthetic construct
  misc_feature 1..20: note = chemically synthesized
  source 1..20: mol_type = other DNA
ttgagaccagcctgatcaac

SEQ ID NO: 56237 - DNA, 20 bp, synthetic construct
  misc_feature 1..20: note = chemically synthesized
  source 1..20: mol_type = other DNA
taaaaaaaaaattacaaaat

SEQ ID NO: 56238 - DNA, 20 bp, synthetic construct
  misc_feature 1..20: note = chemically synthesized
  source 1..20: mol_type = other DNA
aaaaaaattacaaaattagc

SEQ ID NO: 56239 - DNA, 20 bp, synthetic construct
  misc_feature 1..20: note = chemically synthesized
  source 1..20: mol_type = other DNA
aaaaaattacaaaattagcc

SEQ ID NO: 56240 - DNA, 20 bp, synthetic construct
  misc_feature 1..20: note = chemically synthesized
  source 1..20: mol_type = other DNA
aaattacaaaattagccagg

SEQ ID NO: 56241 - DNA, 20 bp, synthetic construct
  misc_feature 1..20: note = chemically synthesized
  source 1..20: mol_type = other DNA
aattacaaaattagccaggt

SEQ ID NO: 56242 - DNA, 20 bp, synthetic construct
  misc_feature 1..20: note = chemically synthesized
  source 1..20: mol_type = other DNA
attacaaaattagccaggtg

SEQ ID NO: 56243 - DNA, 20 bp, synthetic construct
  misc_feature 1..20: note = chemically synthesized
  source 1..20: mol_type = other DNA
acaaaattagccaggtgggg

SEQ ID NO: 56244 - DNA, 20 bp, synthetic construct
  misc_feature 1..20: note = chemically synthesized
  source 1..20: mol_type = other DNA
gtggctcacgcctgtaatcc

SEQ ID NO: 56245 - DNA, 20 bp, synthetic construct
  misc_feature 1..20: note = chemically synthesized
  source 1..20: mol_type = other DNA
gcctgtaatcccagctattt

SEQ ID NO: 56246 - DNA, 20 bp, synthetic construct
  misc_feature 1..20: note = chemically synthesized
  source 1..20: mol_type = other DNA
ctgtaatcccagctatttga

SEQ ID NO: 56247 - DNA, 20 bp, synthetic construct
  misc_feature 1..20: note = chemically synthesized
  source 1..20: mol_type = other DNA
tgtaatcccagctatttgag

SEQ ID NO: 56248 - DNA, 20 bp, synthetic construct
  misc_feature 1..20: note = chemically synthesized
  source 1..20: mol_type = other DNA
tcccagctatttgagaggct

SEQ ID NO: 56249 - DNA, 20 bp, synthetic construct
  misc_feature 1..20: note = chemically synthesized
  source 1..20: mol_type = other DNA
cccagctatttgagaggctg

SEQ ID NO: 56250 - DNA, 20 bp, synthetic construct
  misc_feature 1..20: note = chemically synthesized
  source 1..20: mol_type = other DNA
agctatttgagaggctgagg

SEQ ID NO: 56251 - DNA, 20 bp, synthetic construct
  misc_feature 1..20: note = chemically synthesized
  source 1..20: mol_type = other DNA
gctatttgagaggctgaggc

SEQ ID NO: 56252 - DNA, 20 bp, synthetic construct
  misc_feature 1..20: note = chemically synthesized
  source 1..20: mol_type = other DNA
tatttgagaggctgaggcag

SEQ ID NO: 56253 - DNA, 20 bp, synthetic construct
  misc_feature 1..20: note = chemically synthesized
  source 1..20: mol_type = other DNA
gcaggagaattgcttgaact

SEQ ID NO: 56254 - DNA, 20 bp, synthetic construct
  misc_feature 1..20: note = chemically synthesized
  source 1..20: mol_type = other DNA
caggagaattgcttgaactc

SEQ ID NO: 56255 - DNA, 20 bp, synthetic construct
  misc_feature 1..20: note = chemically synthesized
  source 1..20: mol_type = other DNA
ggagaattgcttgaactcag

SEQ ID NO: 56256 - DNA, 20 bp, synthetic construct
  misc_feature 1..20: note = chemically synthesized
  source 1..20: mol_type = other DNA
gagaattgcttgaactcagg

SEQ ID NO: 56257 - DNA, 20 bp, synthetic construct
  misc_feature 1..20: note = chemically synthesized
  source 1..20: mol_type = other DNA
aattgcttgaactcaggagg

SEQ ID NO: 56258 - DNA, 20 bp, synthetic construct
  misc_feature 1..20: note = chemically synthesized
  source 1..20: mol_type = other DNA
ttgcttgaactcaggaggtg

SEQ ID NO: 56259 - DNA, 20 bp, synthetic construct
  misc_feature 1..20: note = chemically synthesized
  source 1..20: mol_type = other DNA
tgcttgaactcaggaggtgg

SEQ ID NO: 56260 - DNA, 20 bp, synthetic construct
  misc_feature 1..20: note = chemically synthesized
  source 1..20: mol_type = other DNA
aactcaggaggtggaggtta

SEQ ID NO: 56261 - DNA, 20 bp, synthetic construct
  misc_feature 1..20: note = chemically synthesized
  source 1..20: mol_type = other DNA
caggaggtggaggttacagt

SEQ ID NO: 56262 - DNA, 20 bp, synthetic construct
  misc_feature 1..20: note = chemically synthesized
  source 1..20: mol_type = other DNA
ggtggaggttacagtgagcc

SEQ ID NO: 56263 - DNA, 20 bp, synthetic construct
  misc_feature 1..20: note = chemically synthesized
  source 1..20: mol_type = other DNA
gagactgcgccactgcactc

SEQ ID NO: 56264 - DNA, 20 bp, synthetic construct
  misc_feature 1..20: note = chemically synthesized
  source 1..20: mol_type = other DNA
tgcgccactgcactctagcc

SEQ ID NO: 56265 - DNA, 20 bp, synthetic construct
  misc_feature 1..20: note = chemically synthesized
  source 1..20: mol_type = other DNA
gcgccactgcactctagcct

SEQ ID NO: 56266 - DNA, 20 bp, synthetic construct
  misc_feature 1..20: note = chemically synthesized
  source 1..20: mol_type = other DNA
tgcactctagcctgggcaac

SEQ ID NO: 56267 - DNA, 20 bp, synthetic construct
  misc_feature 1..20: note = chemically synthesized
  source 1..20: mol_type = other DNA
cactctagcctgggcaacaa

SEQ ID NO: 56268 - DNA, 20 bp, synthetic construct
  misc_feature 1..20: note = chemically synthesized
  source 1..20: mol_type = other DNA
cgtctcaaaaaaaaaaaaaa

SEQ ID NO: 56269 - DNA, 20 bp, synthetic construct
  misc_feature 1..20: note = chemically synthesized
  source 1..20: mol_type = other DNA
gtctcaaaaaaaaaaaaaaa

SEQ ID NO: 56270 - DNA, 20 bp, synthetic construct
  misc_feature 1..20: note = chemically synthesized
  source 1..20: mol_type = other DNA
caaaaaaaaaaaaaaaaggc

SEQ ID NO: 56271 - DNA, 20 bp, synthetic construct
  misc_feature 1..20: note = chemically synthesized
  source 1..20: mol_type = other DNA
aaaaaaaaaaaaaaaaggcc

SEQ ID NO: 56272 - DNA, 20 bp, synthetic construct
  misc_feature 1..20: note = chemically synthesized
  source 1..20: mol_type = other DNA
aaaaaaaaaaaggccaggcg

SEQ ID NO: 56273 - DNA, 20 bp, synthetic construct
  misc_feature 1..20: note = chemically synthesized
  source 1..20: mol_type = other DNA
aaaaaaaaggccaggcgcgg

SEQ ID NO: 56274 - DNA, 20 bp, synthetic construct
  misc_feature 1..20: note = chemically synthesized
  source 1..20: mol_type = other DNA
gtggctcatgcctgcaatcc

SEQ ID NO: 56275 - DNA, 20 bp, synthetic construct
  misc_feature 1..20: note = chemically synthesized
  source 1..20: mol_type = other DNA
tgcctgcaatcccagcactt

SEQ ID NO: 56276 - DNA, 20 bp, synthetic construct
  misc_feature 1..20: note = chemically synthesized
  source 1..20: mol_type = other DNA
gcctgcaatcccagcacttt

SEQ ID NO: 56277 - DNA, 20 bp, synthetic construct
  misc_feature 1..20: note = chemically synthesized
  source 1..20: mol_type = other DNA
ctgcaatcccagcactttgg

SEQ ID NO: 56278 - DNA, 20 bp, synthetic construct
  misc_feature 1..20: note = chemically synthesized
  source 1..20: mol_type = other DNA
tgcaatcccagcactttggg

SEQ ID NO: 56279 - DNA, 20 bp, synthetic construct
  misc_feature 1..20: note = chemically synthesized
  source 1..20: mol_type = other DNA
tcccagcactttgggaggct

SEQ ID NO: 56280 - DNA, 20 bp, synthetic construct
  misc_feature 1..20: note = chemically synthesized
  source 1..20: mol_type = other DNA
cccagcactttgggaggctg

SEQ ID NO: 56281 - DNA, 20 bp, synthetic construct
  misc_feature 1..20: note = chemically synthesized
  source 1..20: mol_type = other DNA
agcactttgggaggctgagg

SEQ ID NO: 56282 - DNA, 20 bp, synthetic construct
  misc_feature 1..20: note = chemically synthesized
  source 1..20: mol_type = other DNA
ctttgggaggctgaggcgga

SEQ ID NO: 56283 - DNA, 20 bp, synthetic construct
  misc_feature 1..20: note = chemically synthesized
  source 1..20: mol_type = other DNA
ggctgaggcggatggatcac

SEQ ID NO: 56284 - DNA, 20 bp, synthetic construct
  misc_feature 1..20: note = chemically synthesized
  source 1..20: mol_type = other DNA
gctgaggcggatggatcact

SEQ ID NO: 56285 - DNA, 20 bp, synthetic construct
  misc_feature 1..20: note = chemically synthesized
  source 1..20: mol_type = other DNA
aggcggatggatcactaggt

SEQ ID NO: 56286 - DNA, 20 bp, synthetic construct
  misc_feature 1..20: note = chemically synthesized
  source 1..20: mol_type = other DNA
ggcggatggatcactaggtc

SEQ ID NO: 56287 - DNA, 20 bp, synthetic construct
  misc_feature 1..20: note = chemically synthesized
  source 1..20: mol_type = other DNA
cggatggatcactaggtcag

SEQ ID NO: 56288 - DNA, 20 bp, synthetic construct
  misc_feature 1..20: note = chemically synthesized
  source 1..20: mol_type = other DNA
gatcactaggtcaggagttc

SEQ ID NO: 56289 - DNA, 20 bp, synthetic construct
  misc_feature 1..20: note = chemically synthesized
  source 1..20: mol_type = other DNA
ctaggtcaggagttcaagac

SEQ ID NO: 56290 - DNA, 20 bp, synthetic construct
  misc_feature 1..20: note = chemically synthesized
  source 1..20: mol_type = other DNA
tcaggagttcaagaccagcc

SEQ ID NO: 56291 - DNA, 20 bp, synthetic construct
  misc_feature 1..20: note = chemically synthesized
  source 1..20: mol_type = other DNA
caagaccagcctggccaata

SEQ ID NO: 56292 - DNA, 20 bp, synthetic construct
  misc_feature 1..20: note = chemically synthesized
  source 1..20: mol_type = other DNA
tctactaaaaataaaaaaat

SEQ ID NO: 56293 - DNA, 20 bp, synthetic construct
  misc_feature 1..20: note = chemically synthesized
  source 1..20: mol_type = other DNA
ctaaaaataaaaaaattagc

SEQ ID NO: 56294 - DNA, 20 bp, synthetic construct
  misc_feature 1..20: note = chemically synthesized
  source 1..20: mol_type = other DNA
taaaaataaaaaaattagcc

SEQ ID NO: 56295 - DNA, 20 bp, synthetic construct
  misc_feature 1..20: note = chemically synthesized
  source 1..20: mol_type = other DNA
ataaaaaaattagccaggtg

SEQ ID NO: 56296 - DNA, 20 bp, synthetic construct
  misc_feature 1..20: note = chemically synthesized
  source 1..20: mol_type = other DNA
aaaaaattagccaggtgtgg

SEQ ID NO: 56297 - DNA, 20 bp, synthetic construct
  misc_feature 1..20: note = chemically synthesized
  source 1..20: mol_type = other DNA
ggtgtggtggcacgtgcctg

SEQ ID NO: 56298 - DNA, 20 bp, synthetic construct
  misc_feature 1..20: note = chemically synthesized
  source 1..20: mol_type = other DNA
gtggcacgtgcctgtagtcc

SEQ ID NO: 56299 - DNA, 20 bp, synthetic construct
  misc_feature 1..20: note = chemically synthesized
  source 1..20: mol_type = other DNA
tgcctgtagtcccagctact

SEQ ID NO: 56300 - DNA, 20 bp, synthetic construct
  misc_feature 1..20: note = chemically synthesized
  source 1..20: mol_type = other DNA
ctgtagtcccagctactcgg

SEQ ID NO: 56301 - DNA, 20 bp, synthetic construct
  misc_feature 1..20: note = chemically synthesized
  source 1..20: mol_type = other DNA
tgtagtcccagctactcggt

SEQ ID NO: 56302 - DNA, 20 bp, synthetic construct
  misc_feature 1..20: note = chemically synthesized
  source 1..20: mol_type = other DNA
tcccagctactcggtaggct

SEQ ID NO: 56303 - DNA, 20 bp, synthetic construct
  misc_feature 1..20: note = chemically synthesized
  source 1..20: mol_type = other DNA
cccagctactcggtaggctg

SEQ ID NO: 56304 - DNA, 20 bp, synthetic construct
  misc_feature 1..20: note = chemically synthesized
  source 1..20: mol_type = other DNA
agctactcggtaggctgagg

SEQ ID NO: 56305 - DNA, 20 bp, synthetic construct
  misc_feature 1..20: note = chemically synthesized
  source 1..20: mol_type = other DNA
tactcggtaggctgaggcag

SEQ ID NO: 56306 - DNA, 20 bp, synthetic construct
  misc_feature 1..20: note = chemically synthesized
  source 1..20: mol_type = other DNA
ggtaggctgaggcagaagaa

SEQ ID NO: 56307 - DNA, 20 bp, synthetic construct
  misc_feature 1..20: note = chemically synthesized
  source 1..20: mol_type = other DNA
gcagaagaatagcttgaacc

SEQ ID NO: 56308 - DNA, 20 bp, synthetic construct
  misc_feature 1..20: note = chemically synthesized
  source 1..20: mol_type = other DNA
cagaagaatagcttgaaccc

SEQ ID NO: 56309 - DNA, 20 bp, synthetic construct
  misc_feature 1..20: note = chemically synthesized
  source 1..20: mol_type = other DNA
aagaatagcttgaacccagg

SEQ ID NO: 56310 - DNA, 20 bp, synthetic construct
  misc_feature 1..20: note = chemically synthesized
  source 1..20: mol_type = other DNA
aatagcttgaacccaggaag

SEQ ID NO: 56311 - DNA, 20 bp, synthetic construct
  misc_feature 1..20: note = chemically synthesized
  source 1..20: mol_type = other DNA
tagcttgaacccaggaagcg

SEQ ID NO: 56312 - DNA, 20 bp, synthetic construct
  misc_feature 1..20: note = chemically synthesized
  source 1..20: mol_type = other DNA
agcttgaacccaggaagcgg

SEQ ID NO: 56313 - DNA, 20 bp, synthetic construct
  misc_feature 1..20: note = chemically synthesized
  source 1..20: mol_type = other DNA
aacccaggaagcggaggttg

SEQ ID NO: 56314 - DNA, 20 bp, synthetic construct
  misc_feature 1..20: note = chemically synthesized
  source 1..20: mol_type = other DNA
caggaagcggaggttgcagt

SEQ ID NO: 56315 - DNA, 20 bp, synthetic construct
  misc_feature 1..20: note = chemically synthesized
  source 1..20: mol_type = other DNA
aggaagcggaggttgcagtg

SEQ ID NO: 56316 - DNA, 20 bp, synthetic construct
  misc_feature 1..20: note = chemically synthesized
  source 1..20: mol_type = other DNA
agcggaggttgcagtgaggc

SEQ ID NO: 56317 - DNA, 20 bp, synthetic construct
  misc_feature 1..20: note = chemically synthesized
  source 1..20: mol_type = other DNA
gaggttgcagtgaggcgaga

SEQ ID NO: 56318 - DNA, 20 bp, synthetic construct
  misc_feature 1..20: note = chemically synthesized
  source 1..20: mol_type = other DNA
gagatggcgccactgcactc

SEQ ID NO: 56319 - DNA, 20 bp, synthetic construct
  misc_feature 1..20: note = chemically synthesized
  source 1..20: mol_type = other DNA
ggcgccactgcactccagcc

SEQ ID NO: 56320 - DNA, 20 bp, synthetic construct
  misc_feature 1..20: note = chemically synthesized
  source 1..20: mol_type = other DNA
gcgccactgcactccagcct

SEQ ID NO: 56321 - DNA, 20 bp, synthetic construct
  misc_feature 1..20: note = chemically synthesized
  source 1..20: mol_type = other DNA
ctgcactccagcctgggcaa

SEQ ID NO: 56322 - DNA, 20 bp, synthetic construct
  misc_feature 1..20: note = chemically synthesized
  source 1..20: mol_type = other DNA
gcactccagcctgggcaaca

SEQ ID NO: 56323 - DNA, 20 bp, synthetic construct
  misc_feature 1..20: note = chemically synthesized
  source 1..20: mol_type = other DNA
tccagcctgggcaacagagc

SEQ ID NO: 56324 - DNA, 20 bp, synthetic construct
  misc_feature 1..20: note = chemically synthesized
  source 1..20: mol_type = other DNA
aaaaaaaaaaaaaatgcctg

SEQ ID NO: 56325 - DNA, 20 bp, synthetic construct
  misc_feature 1..20: note = chemically synthesized
  source 1..20: mol_type = other DNA
aaaaaaaaaatgcctgtggc

SEQ ID NO: 56326 - DNA, 20 bp, synthetic construct
  misc_feature 1..20: note = chemically synthesized
  source 1..20: mol_type = other DNA
aaaaaaatgcctgtggcaag

SEQ ID NO: 56327 - DNA, 20 bp, synthetic construct
  misc_feature 1..20: note = chemically synthesized
  source 1..20: mol_type = other DNA
attttatctgtttgataatt

SEQ ID NO: 56328 - DNA, 20 bp, synthetic construct
  misc_feature 1..20: note = chemically synthesized
  source 1..20: mol_type = other DNA
ttttatctgtttgataatta

SEQ ID NO: 56329 - DNA, 20 bp, synthetic construct
  misc_feature 1..20: note = chemically synthesized
  source 1..20: mol_type = other DNA
ttgataattaaggatttgca

SEQ ID NO: 56330 - DNA, 20 bp, synthetic construct
  misc_feature 1..20: note = chemically synthesized
  source 1..20: mol_type = other DNA
taattaaggatttgcatggc

SEQ ID NO: 56331 - DNA, 20 bp, synthetic construct
  misc_feature 1..20: note = chemically synthesized
  source 1..20: mol_type = other DNA
aaggatttgcatggctggcg

SEQ ID NO: 56332 - DNA, 20 bp, synthetic construct
  misc_feature 1..20: note = chemically synthesized
  source 1..20: mol_type = other DNA
gatttgcatggctggcgcgg

SEQ ID NO: 56333 - DNA, 20 bp, synthetic construct
  misc_feature 1..20: note = chemically synthesized
  source 1..20: mol_type = other DNA
tgcctgtaatcccaatattt

SEQ ID NO: 56334 - DNA, 20 bp, synthetic construct
  misc_feature 1..20: note = chemically synthesized
  source 1..20: mol_type = other DNA
gcctgtaatcccaatatttt

SEQ ID NO: 56335 - DNA, 20 bp, synthetic construct
  misc_feature 1..20: note = chemically synthesized
  source 1..20: mol_type = other DNA
ctgtaatcccaatattttag

SEQ ID NO: 56336 - DNA, 20 bp, synthetic construct
  misc_feature 1..20: note = chemically synthesized
  source 1..20: mol_type = other DNA
tgtaatcccaatattttagg

SEQ ID NO: 56337 - DNA, 20 bp, synthetic construct
  misc_feature 1..20: note = chemically synthesized
  source 1..20: mol_type = other DNA
tcccaatattttaggaggct

SEQ ID NO: 56338 - DNA, 20 bp, synthetic construct
  misc_feature 1..20: note = chemically synthesized
  source 1..20: mol_type = other DNA
cccaatattttaggaggctg

SEQ ID NO: 56339 - DNA, 20 bp, synthetic construct
  misc_feature 1..20: note = chemically synthesized
  source 1..20: mol_type = other DNA
atattttaggaggctgaggc

SEQ ID NO: 56340 - DNA, 20 bp, synthetic construct
  misc_feature 1..20: note = chemically synthesized
  source 1..20: mol_type = other DNA
ctgaggcaagccaattgctt

SEQ ID NO: 56341 - DNA, 20 bp, synthetic construct
  misc_feature 1..20: note = chemically synthesized
  source 1..20: mol_type = other DNA
caagccaattgcttgagatc

SEQ ID NO: 56342 - DNA, 20 bp, synthetic construct
  misc_feature 1..20: note = chemically synthesized
  source 1..20: mol_type = other DNA
caattgcttgagatcaagac

SEQ ID NO: 56343 - DNA, 20 bp, synthetic construct
  misc_feature 1..20: note = chemically synthesized
  source 1..20: mol_type = other DNA
cttgagatcaagaccagcct

SEQ ID NO: 56344 - DNA, 20 bp, synthetic construct
  misc_feature 1..20: note = chemically synthesized
  source 1..20: mol_type = other DNA
gatcaagaccagcctgagcc

SEQ ID NO: 56345 - DNA, 20 bp, synthetic construct
  misc_feature 1..20: note = chemically synthesized
  source 1..20: mol_type = other DNA
atcaagaccagcctgagcct

SEQ ID NO: 56346 - DNA, 20 bp, synthetic construct
  misc_feature 1..20: note = chemically synthesized
  source 1..20: mol_type = other DNA
cagcctgagcctgggcaaca

SEQ ID NO: 56347 - DNA, 20 bp, synthetic construct
  misc_feature 1..20: note = chemically synthesized
  source 1..20: mol_type = other DNA
cctgagcctgggcaacatag

SEQ ID NO: 56348 - DNA, 20 bp, synthetic construct
  misc_feature 1..20: note = chemically synthesized
  source 1..20: mol_type = other DNA
cagaactctgtctctacaaa

SEQ ID NO: 56349 - DNA, 20 bp, synthetic construct
  misc_feature 1..20: note = chemically synthesized
  source 1..20: mol_type = other DNA
ctgtctctacaaaaagatac

SEQ ID NO: 56350 - DNA, 20 bp, synthetic construct
  misc_feature 1..20: note = chemically synthesized
  source 1..20: mol_type = other DNA
tacaaaaagatacgagaaat

SEQ ID NO: 56351 - DNA, 20 bp, synthetic construct
  misc_feature 1..20: note = chemically synthesized
  source 1..20: mol_type = other DNA
aaaagatacgagaaattagc

SEQ ID NO: 56352 - DNA, 20 bp, synthetic construct
  misc_feature 1..20: note = chemically synthesized
  source 1..20: mol_type = other DNA
aaagatacgagaaattagct

SEQ ID NO: 56353 - DNA, 20 bp, synthetic construct
  misc_feature 1..20: note = chemically synthesized
  source 1..20: mol_type = other DNA
tacgagaaattagctgggtg

SEQ ID NO: 56354 - DNA, 20 bp, synthetic construct
  misc_feature 1..20: note = chemically synthesized
  source 1..20: mol_type = other DNA
aattagctgggtgtggtgtg

SEQ ID NO: 56355 - DNA, 20 bp, synthetic construct
  misc_feature 1..20: note = chemically synthesized
  source 1..20: mol_type = other DNA
tgggtgtggtgtgtggcctg

SEQ ID NO: 56356 - DNA, 20 bp, synthetic construct
  misc_feature 1..20: note = chemically synthesized
  source 1..20: mol_type = other DNA
tggtgtgtggcctgtggtcc

SEQ ID NO: 56357 - DNA, 20 bp, synthetic construct
  misc_feature 1..20: note = chemically synthesized
  source 1..20: mol_type = other DNA
ggcctgtggtcccagctact

SEQ ID NO: 56358 - DNA, 20 bp, synthetic construct
  misc_feature 1..20: note = chemically synthesized
  source 1..20: mol_type = other DNA
tgtggtcccagctactcaga

SEQ ID NO: 56359 - DNA, 20 bp, synthetic construct
  misc_feature 1..20: note = chemically synthesized
  source 1..20: mol_type = other DNA
tcccagctactcagatggct

SEQ ID NO: 56360 - DNA, 20 bp, synthetic construct
  misc_feature 1..20: note = chemically synthesized
  source 1..20: mol_type = other DNA
cccagctactcagatggctg

SEQ ID NO: 56361 - DNA, 20 bp, synthetic construct
  misc_feature 1..20: note = chemically synthesized
  source 1..20: mol_type = other DNA
agctactcagatggctgagg

SEQ ID NO: 56362 - DNA, 20 bp, synthetic construct
  misc_feature 1..20: note = chemically synthesized
  source 1..20: mol_type = other DNA
gctactcagatggctgaggt

SEQ ID NO: 56363 - DNA, 20 bp, synthetic construct
  misc_feature 1..20: note = chemically synthesized
  source 1..20: mol_type = other DNA
tactcagatggctgaggtgg

SEQ ID NO: 56364 - DNA, 20 bp, synthetic construct
  misc_feature 1..20: note = chemically synthesized
  source 1..20: mol_type = other DNA
actcagatggctgaggtggg

SEQ ID NO: 56365 - DNA, 20 bp, synthetic construct
  misc_feature 1..20: note = chemically synthesized
  source 1..20: mol_type = other DNA
ctgaggtgggaggatcgctt

SEQ ID NO: 56366 - DNA, 20 bp, synthetic construct
  misc_feature 1..20: note = chemically synthesized
  source 1..20: mol_type = other DNA
gtgggaggatcgcttgagcc

SEQ ID NO: 56367 - DNA, 20 bp, synthetic construct
  misc_feature 1..20: note = chemically synthesized
  source 1..20: mol_type = other DNA
tgggaggatcgcttgagcct

SEQ ID NO: 56368 - DNA, 20 bp, synthetic construct
  misc_feature 1..20: note = chemically synthesized
  source 1..20: mol_type = other DNA
ggaggatcgcttgagcctgg

SEQ ID NO: 56369 - DNA, 20 bp, synthetic construct
  misc_feature 1..20: note = chemically synthesized
  source 1..20: mol_type = other DNA
gaggatcgcttgagcctggg

SEQ ID NO: 56370 - DNA, 20 bp, synthetic construct
  misc_feature 1..20: note = chemically synthesized
  source 1..20: mol_type = other DNA
gatcgcttgagcctgggagg

SEQ ID NO: 56371 - DNA, 20 bp, synthetic construct
  misc_feature 1..20: note = chemically synthesized
  source 1..20: mol_type = other DNA
tcgcttgagcctgggaggca

SEQ ID NO: 56372 - DNA, 20 bp, synthetic construct
  misc_feature 1..20: note = chemically synthesized
  source 1..20: mol_type = other DNA
cgcttgagcctgggaggcag

SEQ ID NO: 56373 - DNA, 20 bp, synthetic construct
  misc_feature 1..20: note = chemically synthesized
  source 1..20: mol_type = other DNA
agcctgggaggcagaggttg

SEQ ID NO: 56374 - DNA, 20 bp, synthetic construct
  misc_feature 1..20: note = chemically synthesized
  source 1..20: mol_type = other DNA
tgggaggcagaggttgcagc

SEQ ID NO: 56375 - DNA, 20 bp, synthetic construct
  misc_feature 1..20: note = chemically synthesized
  source 1..20: mol_type = other DNA
atgatcgtgccactgcactt

SEQ ID NO: 56376 - DNA, 20 bp, synthetic construct
  misc_feature 1..20: note = chemically synthesized
  source 1..20: mol_type = other DNA
cgtgccactgcacttcagcc

SEQ ID NO: 56377 - DNA, 20 bp, synthetic construct
  misc_feature 1..20: note = chemically synthesized
  source 1..20: mol_type = other DNA
ctgcacttcagcctggatga

SEQ ID NO: 56378 - DNA, 20 bp, synthetic construct
  misc_feature 1..20: note = chemically synthesized
  source 1..20: mol_type = other DNA
gcacttcagcctggatgaca

SEQ ID NO: 56379 - DNA, 20 bp, synthetic construct
  misc_feature 1..20: note = chemically synthesized
  source 1..20: mol_type = other DNA
ttcagcctggatgacagagc

SEQ ID NO: 56380 - DNA, 20 bp, synthetic construct
  misc_feature 1..20: note = chemically synthesized
  source 1..20: mol_type = other DNA
atctcaaaaataaaaataaa

SEQ ID NO: 56381 - DNA, 20 bp, synthetic construct
  misc_feature 1..20: note = chemically synthesized
  source 1..20: mol_type = other DNA
tctcaaaaataaaaataaaa

SEQ ID NO: 56382 - DNA, 20 bp, synthetic construct
  misc_feature 1..20: note = chemically synthesized
  source 1..20: mol_type = other DNA
aataaaaaggatttgcactg

SEQ ID NO: 56383 - DNA, 20 bp, synthetic construct
  misc_feature 1..20: note = chemically synthesized
  source 1..20: mol_type = other DNA
ttgcactgtggctgcacacc

SEQ ID NO: 56384 - DNA, 20 bp, synthetic construct
  misc_feature 1..20: note = chemically synthesized
  source 1..20: mol_type = other DNA
tgcacacccggaattctctg

SEQ ID NO: 56385 - DNA, 20 bp, synthetic construct
  misc_feature 1..20: note = chemically synthesized
  source 1..20: mol_type = other DNA
acacccggaattctctgtag

SEQ ID NO: 56386 - DNA, 20 bp, synthetic construct
  misc_feature 1..20: note = chemically synthesized
  source 1..20: mol_type = other DNA
cacccggaattctctgtagt

SEQ ID NO: 56387 - DNA, 20 bp, synthetic construct
  misc_feature 1..20: note = chemically synthesized
  source 1..20: mol_type = other DNA
aggaatatcttctgtttctc

SEQ ID NO: 56388 - DNA, 20 bp, synthetic construct
  misc_feature 1..20: note = chemically synthesized
  source 1..20: mol_type = other DNA
tttctctggttattttaacc

SEQ ID NO: 56389 - DNA, 20 bp, synthetic construct
  misc_feature 1..20: note = chemically synthesized
  source 1..20: mol_type = other DNA
tctggttattttaacctgga

SEQ ID NO: 56390 - DNA, 20 bp, synthetic construct
  misc_feature 1..20: note = chemically synthesized
  source 1..20: mol_type = other DNA
ctggttattttaacctggat

SEQ ID NO: 56391 - DNA, 20 bp, synthetic construct
  misc_feature 1..20: note = chemically synthesized
  source 1..20: mol_type = other DNA
aacctggatgggtgactctg

SEQ ID NO: 56392 - DNA, 20 bp, synthetic construct
  misc_feature 1..20: note = chemically synthesized
  source 1..20: mol_type = other DNA
tggatgggtgactctgtggt

SEQ ID NO: 56393 - DNA, 20 bp, synthetic construct
  misc_feature 1..20: note = chemically synthesized
  source 1..20: mol_type = other DNA
gggtgactctgtggttggta

SEQ ID NO: 56394 - DNA, 20 bp, synthetic construct
  misc_feature 1..20: note = chemically synthesized
  source 1..20: mol_type = other DNA
ctctgtggttggtacagaca

SEQ ID NO: 56395 - DNA, 20 bp, synthetic construct
  misc_feature 1..20: note = chemically synthesized
  source 1..20: mol_type = other DNA
tctgtggttggtacagacat

SEQ ID NO: 56396 - DNA, 20 bp, synthetic construct
  misc_feature 1..20: note = chemically synthesized
  source 1..20: mol_type = other DNA
acagacatgggtttttattt

SEQ ID NO: 56397 - DNA, 20 bp, synthetic construct
  misc_feature 1..20: note = chemically synthesized
  source 1..20: mol_type = other DNA
cttcactaccttatttttat

SEQ ID NO: 56398 - DNA, 20 bp, synthetic construct
  misc_feature 1..20: note = chemically synthesized
  source 1..20: mol_type = other DNA
tatttttataagtcccttca

SEQ ID NO: 56399 - DNA, 20 bp, synthetic construct
  misc_feature 1..20: note = chemically synthesized
  source 1..20: mol_type = other DNA
tataagtcccttcatggtgt

SEQ ID NO: 56400 - DNA, 20 bp, synthetic construct
  misc_feature 1..20: note = chemically synthesized
  source 1..20: mol_type = other DNA
ataagtcccttcatggtgtt

SEQ ID NO: 56401 - DNA, 20 bp, synthetic construct
  misc_feature 1..20: note = chemically synthesized
  source 1..20: mol_type = other DNA
tttccttatctgtaaaacaa

SEQ ID NO: 56402 - DNA, 20 bp, synthetic construct
  misc_feature 1..20: note = chemically synthesized
  source 1..20: mol_type = other DNA
aaaacaacggattgcactac

SEQ ID NO: 56403 - DNA, 20 bp, synthetic construct
  misc_feature 1..20: note = chemically synthesized
  source 1..20: mol_type = other DNA
ttgcactactggatcccttt

SEQ ID NO: 56404 - DNA, 20 bp, synthetic construct
  misc_feature 1..20: note = chemically synthesized
  source 1..20: mol_type = other DNA
cccaaacattccctgactct

SEQ ID NO: 56405 - DNA, 20 bp, synthetic construct
  misc_feature 1..20: note = chemically synthesized
  source 1..20: mol_type = other DNA
ccaaacattccctgactctg

SEQ ID NO: 56406 - DNA, 20 bp, synthetic construct
  misc_feature 1..20: note = chemically synthesized
  source 1..20: mol_type = other DNA
ctgaggtttatccctatcca

SEQ ID NO: 56407 - DNA, 20 bp, synthetic construct
  misc_feature 1..20: note = chemically synthesized
  source 1..20: mol_type = other DNA
aaagtgccacaactcttaat

SEQ ID NO: 56408 - DNA, 20 bp, synthetic construct
  misc_feature 1..20: note = chemically synthesized
  source 1..20: mol_type = other DNA
gtgccacaactcttaatcag

SEQ ID NO: 56409 - DNA, 20 bp, synthetic construct
  misc_feature 1..20: note = chemically synthesized
  source 1..20: mol_type = other DNA
actcttaatcagcggctgcc

SEQ ID NO: 56410 - DNA, 20 bp, synthetic construct
  misc_feature 1..20: note = chemically synthesized
  source 1..20: mol_type = other DNA
ctcttaatcagcggctgccc

SEQ ID NO: 56411 - DNA, 20 bp, synthetic construct
  misc_feature 1..20: note = chemically synthesized
  source 1..20: mol_type = other DNA
aatcagcggctgcccaggtg

SEQ ID NO: 56412 - DNA, 20 bp, synthetic construct
  misc_feature 1..20: note = chemically synthesized
  source 1..20: mol_type = other DNA
atcagcggctgcccaggtgt

SEQ ID NO: 56413 - DNA, 20 bp, synthetic construct
  misc_feature 1..20: note = chemically synthesized
  source 1..20: mol_type = other DNA
cagcggctgcccaggtgtgg

SEQ ID NO: 56414 - DNA, 20 bp, synthetic construct
  misc_feature 1..20: note = chemically synthesized
  source 1..20: mol_type = other DNA
cggctgcccaggtgtgggag

SEQ ID NO: 56415 - DNA, 20 bp, synthetic construct
  misc_feature 1..20: note = chemically synthesized
  source 1..20: mol_type = other DNA
ggctgcccaggtgtgggagc

SEQ ID NO: 56416 - DNA, 20 bp, synthetic construct
  misc_feature 1..20: note = chemically synthesized
  source 1..20: mol_type = other DNA
gcccaggtgtgggagcgggc

SEQ ID NO: 56417 - DNA, 20 bp, synthetic construct
  misc_feature 1..20: note = chemically synthesized
  source 1..20: mol_type = other DNA
cccaggtgtgggagcgggct

SEQ ID NO: 56418 - DNA, 20 bp, synthetic construct
  misc_feature 1..20: note = chemically synthesized
  source 1..20: mol_type = other DNA
ccaggtgtgggagcgggcta

SEQ ID NO: 56419 - DNA, 20 bp, synthetic construct
  misc_feature 1..20: note = chemically synthesized
  source 1..20: mol_type = other DNA
caggtgtgggagcgggctag

SEQ ID NO: 56420 - DNA, 20 bp, synthetic construct
  misc_feature 1..20: note = chemically synthesized
  source 1..20: mol_type = other DNA
aggtgtgggagcgggctagg

SEQ ID NO: 56421 - DNA, 20 bp, synthetic construct
  misc_feature 1..20: note = chemically synthesized
  source 1..20: mol_type = other DNA
ggagcgggctagggggatgt

SEQ ID NO: 56422 - DNA, 20 bp, synthetic construct
  misc_feature 1..20: note = chemically synthesized
  source 1..20: mol_type = other DNA
gagcgggctagggggatgtg

SEQ ID NO: 56423 - DNA, 20 bp, synthetic construct
  misc_feature 1..20: note = chemically synthesized
  source 1..20: mol_type = other DNA
cgggctagggggatgtgagg

SEQ ID NO: 56424 - DNA, 20 bp, synthetic construct
  misc_feature 1..20: note = chemically synthesized
  source 1..20: mol_type = other DNA
gggatgtgaggaagaatacg

SEQ ID NO: 56425 - DNA, 20 bp, synthetic construct
  misc_feature 1..20: note = chemically synthesized
  source 1..20: mol_type = other DNA
aggaagaatacgtggtgtgt

SEQ ID NO: 56426 - DNA, 20 bp, synthetic construct
  misc_feature 1..20: note = chemically synthesized
  source 1..20: mol_type = other DNA
aatacgtggtgtgtcagcta

SEQ ID NO: 56427 - DNA, 20 bp, synthetic construct
  misc_feature 1..20: note = chemically synthesized
  source 1..20: mol_type = other DNA
tacgtggtgtgtcagctaca

SEQ ID NO: 56428 - DNA, 20 bp, synthetic construct
  misc_feature 1..20: note = chemically synthesized
  source 1..20: mol_type = other DNA
cgtggtgtgtcagctacaga

SEQ ID NO: 56429 - DNA, 20 bp, synthetic construct
  misc_feature 1..20: note = chemically synthesized
  source 1..20: mol_type = other DNA
tggtgtgtcagctacagaga

SEQ ID NO: 56430 - DNA, 20 bp, synthetic construct
  misc_feature 1..20: note = chemically synthesized
  source 1..20: mol_type = other DNA
gccctccaccacctacaccc

SEQ ID NO: 56431 - DNA, 20 bp, synthetic construct
  misc_feature 1..20: note = chemically synthesized
  source 1..20: mol_type = other DNA
ctccaccacctacaccccag

SEQ ID NO: 56432 - DNA, 20 bp, synthetic construct
  misc_feature 1..20: note = chemically synthesized
  source 1..20: mol_type = other DNA
accacctacaccccagtggt

SEQ ID NO: 56433 - DNA, 20 bp, synthetic construct
  misc_feature 1..20: note = chemically synthesized
  source 1..20: mol_type = other DNA
tgagttcttaccgaaatctg

SEQ ID NO: 56434 - DNA, 20 bp, synthetic construct
  misc_feature 1..20: note = chemically synthesized
  source 1..20: mol_type = other DNA
gagttcttaccgaaatctgt

SEQ ID NO: 56435 - DNA, 20 bp, synthetic construct
  misc_feature 1..20: note = chemically synthesized
  source 1..20: mol_type = other DNA
tcttaccgaaatctgtaggt

SEQ ID NO: 56436 - DNA, 20 bp, synthetic construct
  misc_feature 1..20: note = chemically synthesized
  source 1..20: mol_type = other DNA
tcggctttatctttccctga

SEQ ID NO: 56437 - DNA, 20 bp, synthetic construct
  misc_feature 1..20: note = chemically synthesized
  source 1..20: mol_type = other DNA
ctttatctttccctgaaaga

SEQ ID NO: 56438 - DNA, 20 bp, synthetic construct
  misc_feature 1..20: note = chemically synthesized
  source 1..20: mol_type = other DNA
atctttccctgaaagatgga

SEQ ID NO: 56439 - DNA, 20 bp, synthetic construct
  misc_feature 1..20: note = chemically synthesized
  source 1..20: mol_type = other DNA
ctttccctgaaagatggaaa

SEQ ID NO: 56440 - DNA, 20 bp, synthetic construct
  misc_feature 1..20: note = chemically synthesized
  source 1..20: mol_type = other DNA
tccctgaaagatggaaagag

SEQ ID NO: 56441 - DNA, 20 bp, synthetic construct
  misc_feature 1..20: note = chemically synthesized
  source 1..20: mol_type = other DNA
gagtagatgtgaccatcacg

SEQ ID NO: 56442 - DNA, 20 bp, synthetic construct
  misc_feature 1..20: note = chemically synthesized
  source 1..20: mol_type = other DNA
gtatacacctgctgtgccca

SEQ ID NO: 56443 - DNA, 20 bp, synthetic construct
  misc_feature 1..20: note = chemically synthesized
  source 1..20: mol_type = other DNA
cacctgctgtgcccatggca

SEQ ID NO: 56444 - DNA, 20 bp, synthetic construct
  misc_feature 1..20: note = chemically synthesized
  source 1..20: mol_type = other DNA
tgctgtgcccatggcatggc

SEQ ID NO: 56445 - DNA, 20 bp, synthetic construct
  misc_feature 1..20: note = chemically synthesized
  source 1..20: mol_type = other DNA
ctgtgcccatggcatggcca

SEQ ID NO: 56446 - DNA, 20 bp, synthetic construct
  misc_feature 1..20: note = chemically synthesized
  source 1..20: mol_type = other DNA
tgtgcccatggcatggccag

SEQ ID NO: 56447 - DNA, 20 bp, synthetic construct
  misc_feature 1..20: note = chemically synthesized
  source 1..20: mol_type = other DNA
gtgcccatggcatggccaga

SEQ ID NO: 56448 - DNA, 20 bp, synthetic construct
  misc_feature 1..20: note = chemically synthesized
  source 1..20: mol_type = other DNA
tgcccatggcatggccagag

SEQ ID NO: 56449 - DNA, 20 bp, synthetic construct
  misc_feature 1..20: note = chemically synthesized
  source 1..20: mol_type = other DNA
atggccagaggggctcccta

SEQ ID NO: 56450 - DNA, 20 bp, synthetic construct
  misc_feature 1..20: note = chemically synthesized
  source 1..20: mol_type = other DNA
tggccagaggggctccctaa

SEQ ID NO: 56451 - DNA, 20 bp, synthetic construct
  misc_feature 1..20: note = chemically synthesized
  source 1..20: mol_type = other DNA
ggccagaggggctccctaaa

SEQ ID NO: 56452 - DNA, 20 bp, synthetic construct
  misc_feature 1..20: note = chemically synthesized
  source 1..20: mol_type = other DNA
cagaggggctccctaaaggg

SEQ ID NO: 56453 - DNA, 20 bp, synthetic construct
  misc_feature 1..20: note = chemically synthesized
  source 1..20: mol_type = other DNA
agaggggctccctaaagggc

SEQ ID NO: 56454 - DNA, 20 bp, synthetic construct
  misc_feature 1..20: note = chemically synthesized
  source 1..20: mol_type = other DNA
gggctccctaaagggcagga

SEQ ID NO: 56455 - DNA, 20 bp, synthetic construct
  misc_feature 1..20: note = chemically synthesized
  source 1..20: mol_type = other DNA
gctccctaaagggcaggaaa

SEQ ID NO: 56456 - DNA, 20 bp, synthetic construct
  misc_feature 1..20: note = chemically synthesized
  source 1..20: mol_type = other DNA
ctaaagggcaggaaagagaa

SEQ ID NO: 56457 - DNA, 20 bp, synthetic construct
  misc_feature 1..20: note = chemically synthesized
  source 1..20: mol_type = other DNA
aaagggcaggaaagagaatg

SEQ ID NO: 56458 - DNA, 20 bp, synthetic construct
  misc_feature 1..20: note = chemically synthesized
  source 1..20: mol_type = other DNA
gcaggaaagagaatggagta

SEQ ID NO: 56459 - DNA, 20 bp, synthetic construct
  misc_feature 1..20: note = chemically synthesized
  source 1..20: mol_type = other DNA
caggaaagagaatggagtaa

SEQ ID NO: 56460 - DNA, 20 bp, synthetic construct
  misc_feature 1..20: note = chemically synthesized
  source 1..20: mol_type = other DNA
gagaatggagtaaaggtgaa

SEQ ID NO: 56461 - DNA, 20 bp, synthetic construct
  misc_feature 1..20: note = chemically synthesized
  source 1..20: mol_type = other DNA
agaatggagtaaaggtgaaa

SEQ ID NO: 56462 - DNA, 20 bp, synthetic construct
  misc_feature 1..20: note = chemically synthesized
  source 1..20: mol_type = other DNA
aaggtgaaaaggtcctcatc

SEQ ID NO: 56463 - DNA, 20 bp, synthetic construct
  misc_feature 1..20: note = chemically synthesized
  source 1..20: mol_type = other DNA
aggtgaaaaggtcctcatct

SEQ ID NO: 56464 - DNA, 20 bp, synthetic construct
  misc_feature 1..20: note = chemically synthesized
  source 1..20: mol_type = other DNA
gtgaaaaggtcctcatctgg

SEQ ID NO: 56465 - DNA, 20 bp, synthetic construct
  misc_feature 1..20: note = chemically synthesized
  source 1..20: mol_type = other DNA
aaaggtcctcatctgggaga

SEQ ID NO: 56466 - DNA, 20 bp, synthetic construct
  misc_feature 1..20: note = chemically synthesized
  source 1..20: mol_type = other DNA
gagacagtgcatcatctacc

SEQ ID NO: 56467 - DNA, 20 bp, synthetic construct
  misc_feature 1..20: note = chemically synthesized
  source 1..20: mol_type = other DNA
gcatcatctacccagccacc

SEQ ID NO: 56468 - DNA, 20 bp, synthetic construct
  misc_feature 1..20: note = chemically synthesized
  source 1..20: mol_type = other DNA
atttccatctcctatgcacc

SEQ ID NO: 56469 - DNA, 20 bp, synthetic construct
  misc_feature 1..20: note = chemically synthesized
  source 1..20: mol_type = other DNA
ctatgcaccaagcattgtgc

SEQ ID NO: 56470 - DNA, 20 bp, synthetic construct
  misc_feature 1..20: note = chemically synthesized
  source 1..20: mol_type = other DNA
tatgcaccaagcattgtgca

SEQ ID NO: 56471 - DNA, 20 bp, synthetic construct
  misc_feature 1..20: note = chemically synthesized
  source 1..20: mol_type = other DNA
ccaagcattgtgcaaggctc

SEQ ID NO: 56472 - DNA, 20 bp, synthetic construct
  misc_feature 1..20: note = chemically synthesized
  source 1..20: mol_type = other DNA
caagcattgtgcaaggctct

SEQ ID NO: 56473 - DNA, 20 bp, synthetic construct
  misc_feature 1..20: note = chemically synthesized
  source 1..20: mol_type = other DNA
ggctctgggaatacaatgat

SEQ ID NO: 56474 - DNA, 20 bp, synthetic construct
  misc_feature 1..20: note = chemically synthesized
  source 1..20: mol_type = other DNA
tgggaatacaatgatgagca

SEQ ID NO: 56475 - DNA, 20 bp, synthetic construct
  misc_feature 1..20: note = chemically synthesized
  source 1..20: mol_type = other DNA
aatacaatgatgagcaaagc

SEQ ID NO: 56476 - DNA, 20 bp, synthetic construct
  misc_feature 1..20: note = chemically synthesized
  source 1..20: mol_type = other DNA
tacaatgatgagcaaagcca

SEQ ID NO: 56477 - DNA, 20 bp, synthetic construct
  misc_feature 1..20: note = chemically synthesized
  source 1..20: mol_type = other DNA
caatgatgagcaaagccaga

SEQ ID NO: 56478 - DNA, 20 bp, synthetic construct
  misc_feature 1..20: note = chemically synthesized
  source 1..20: mol_type = other DNA
aatgatgagcaaagccagag

SEQ ID NO: 56479 - DNA, 20 bp, synthetic construct
  misc_feature 1..20: note = chemically synthesized
  source 1..20: mol_type = other DNA
atgatgagcaaagccagaga

SEQ ID NO: 56480 - DNA, 20 bp, synthetic construct
  misc_feature 1..20: note = chemically synthesized
  source 1..20: mol_type = other DNA
tgatgagcaaagccagagag

SEQ ID NO: 56481 - DNA, 20 bp, synthetic construct
  misc_feature 1..20: note = chemically synthesized
  source 1..20: mol_type = other DNA
agagaggggccctgctcttg

SEQ ID NO: 56482 - DNA, 20 bp, synthetic construct
  misc_feature 1..20: note = chemically synthesized
  source 1..20: mol_type = other DNA
cctgctcttgcagtttaata

SEQ ID NO: 56483 - DNA, 20 bp, synthetic construct
  misc_feature 1..20: note = chemically synthesized
  source 1..20: mol_type = other DNA
tcttgcagtttaatacagtc

SEQ ID NO: 56484 - DNA, 20 bp, synthetic construct
  misc_feature 1..20: note = chemically synthesized
  source 1..20: mol_type = other DNA
ttgcagtttaatacagtctg

SEQ ID NO: 56485 - DNA, 20 bp, synthetic construct
  misc_feature 1..20: note = chemically synthesized
  source 1..20: mol_type = other DNA
tacagtctggagattacaca

SEQ ID NO: 56486 - DNA, 20 bp, synthetic construct
  misc_feature 1..20: note = chemically synthesized
  source 1..20: mol_type = other DNA
ctggagattacacaaagaat

SEQ ID NO: 56487 - DNA, 20 bp, synthetic construct
  misc_feature 1..20: note = chemically synthesized
  source 1..20: mol_type = other DNA
tacacaaagaatcagcatac

SEQ ID NO: 56488 - DNA, 20 bp, synthetic construct
  misc_feature 1..20: note = chemically synthesized
  source 1..20: mol_type = other DNA
acacaaagaatcagcatact

SEQ ID NO: 56489 - DNA, 20 bp, synthetic construct
  misc_feature 1..20: note = chemically synthesized
  source 1..20: mol_type = other DNA
tctccttgcacactctgttc

SEQ ID NO: 56490 - DNA, 20 bp, synthetic construct
  misc_feature 1..20: note = chemically synthesized
  source 1..20: mol_type = other DNA
acactctgttctggctacac

SEQ ID NO: 56491 - DNA, 20 bp, synthetic construct
  misc_feature 1..20: note = chemically synthesized
  source 1..20: mol_type = other DNA
caccaaacacgttcccacct

SEQ ID NO: 56492 - DNA, 20 bp, synthetic construct
  misc_feature 1..20: note = chemically synthesized
  source 1..20: mol_type = other DNA
accaaacacgttcccacctc

SEQ ID NO: 56493 - DNA, 20 bp, synthetic construct
  misc_feature 1..20: note = chemically synthesized
  source 1..20: mol_type = other DNA
ccaaacacgttcccacctca

SEQ ID NO: 56494 - DNA, 20 bp, synthetic construct
  misc_feature 1..20: note = chemically synthesized
  source 1..20: mol_type = other DNA
ttttgcattgcaatcttctc

SEQ ID NO: 56495 - DNA, 20 bp, synthetic construct
  misc_feature 1..20: note = chemically synthesized
  source 1..20: mol_type = other DNA
gcattgcaatcttctctggc

SEQ ID NO: 56496 - DNA, 20 bp, synthetic construct
  misc_feature 1..20: note = chemically synthesized
  source 1..20: mol_type = other DNA
tgcaatcttctctggccaga

SEQ ID NO: 56497 - DNA, 20 bp, synthetic construct
  misc_feature 1..20: note = chemically synthesized
  source 1..20: mol_type = other DNA
tctggccagacagcccttca

SEQ ID NO: 56498 - DNA, 20 bp, synthetic construct
  misc_feature 1..20: note = chemically synthesized
  source 1..20: mol_type = other DNA
gcccttcacagctcttctgc

SEQ ID NO: 56499 - DNA, 20 bp, synthetic construct
  misc_feature 1..20: note = chemically synthesized
  source 1..20: mol_type = other DNA
cttacttcctcacatccttg

SEQ ID NO: 56500 - DNA, 20 bp, synthetic construct
  misc_feature 1..20: note = chemically synthesized
  source 1..20: mol_type = other DNA
acatccttgaagacttgact

SEQ ID NO: 56501 - DNA, 20 bp, synthetic construct
  misc_feature 1..20: note = chemically synthesized
  source 1..20: mol_type = other DNA
tgactcagatctcatattct

SEQ ID NO: 56502 - DNA, 20 bp, synthetic construct
  misc_feature 1..20: note = chemically synthesized
  source 1..20: mol_type = other DNA
tcagatctcatattctcagt

SEQ ID NO: 56503 - DNA, 20 bp, synthetic construct
  misc_feature 1..20: note = chemically synthesized
  source 1..20: mol_type = other DNA
tatttaaccctgcttgcaac

SEQ ID NO: 56504 - DNA, 20 bp, synthetic construct
  misc_feature 1..20: note = chemically synthesized
  source 1..20: mol_type = other DNA
ttgtttgttttttgtttttt

SEQ ID NO: 56505 - DNA, 20 bp, synthetic construct
  misc_feature 1..20: note = chemically synthesized
  source 1..20: mol_type = other DNA
gtttgttttttgttttttta

SEQ ID NO: 56506 - DNA, 20 bp, synthetic construct
  misc_feature 1..20: note = chemically synthesized
  source 1..20: mol_type = other DNA
gttttttgtttttttagaga

SEQ ID NO: 56507 - DNA, 20 bp, synthetic construct
  misc_feature 1..20: note = chemically synthesized
  source 1..20: mol_type = other DNA
cagtgtcttgctttgtctcc

SEQ ID NO: 56508 - DNA, 20 bp, synthetic construct
  misc_feature 1..20: note = chemically synthesized
  source 1..20: mol_type = other DNA
agtgtcttgctttgtctcct

SEQ ID NO: 56509 - DNA, 20 bp, synthetic construct
  misc_feature 1..20: note = chemically synthesized
  source 1..20: mol_type = other DNA
ttgtctcctaggctgcaatg

SEQ ID NO: 56510 - DNA, 20 bp, synthetic construct
  misc_feature 1..20: note = chemically synthesized
  source 1..20: mol_type = other DNA
gcaatgcagtgccatgatca

SEQ ID NO: 56511 - DNA, 20 bp, synthetic construct
  misc_feature 1..20: note = chemically synthesized
  source 1..20: mol_type = other DNA
gccatgatcatagctcactg

SEQ ID NO: 56512 - DNA, 20 bp, synthetic construct
  misc_feature 1..20: note = chemically synthesized
  source 1..20: mol_type = other DNA
tcactgcagcctcgacctcc

SEQ ID NO: 56513 - DNA, 20 bp, synthetic construct
  misc_feature 1..20: note = chemically synthesized
  source 1..20: mol_type = other DNA
agcctcgacctcctggactc

SEQ ID NO: 56514 - DNA, 20 bp, synthetic construct
  misc_feature 1..20: note = chemically synthesized
  source 1..20: mol_type = other DNA
ctcaagcaatcctcccacct

SEQ ID NO: 56515 - DNA, 20 bp, synthetic construct
  misc_feature 1..20: note = chemically synthesized
  source 1..20: mol_type = other DNA
tcctcccacctcagccccct

SEQ ID NO: 56516 - DNA, 20 bp, synthetic construct
  misc_feature 1..20: note = chemically synthesized
  source 1..20: mol_type = other DNA
tcccacctcagccccctgag

SEQ ID NO: 56517 - DNA, 20 bp, synthetic construct
  misc_feature 1..20: note = chemically synthesized
  source 1..20: mol_type = other DNA
acctcagccccctgagtagc

SEQ ID NO: 56518 - DNA, 20 bp, synthetic construct
  misc_feature 1..20: note = chemically synthesized
  source 1..20: mol_type = other DNA
cctcagccccctgagtagct

SEQ ID NO: 56519 - DNA, 20 bp, synthetic construct
  misc_feature 1..20: note = chemically synthesized
  source 1..20: mol_type = other DNA
cccctgagtagctgggacca

SEQ ID NO: 56520 - DNA, 20 bp, synthetic construct
  misc_feature 1..20: note = chemically synthesized
  source 1..20: mol_type = other DNA
ccctgagtagctgggaccac

SEQ ID NO: 56521 - DNA, 20 bp, synthetic construct
  misc_feature 1..20: note = chemically synthesized
  source 1..20: mol_type = other DNA
caggtgcacaccaccacaca

SEQ ID NO: 56522 - DNA, 20 bp, synthetic construct
  misc_feature 1..20: note = chemically synthesized
  source 1..20: mol_type = other DNA
tttgtttgattgtttttgcc

SEQ ID NO: 56523 - DNA, 20 bp, synthetic construct
  misc_feature 1..20: note = chemically synthesized
  source 1..20: mol_type = other DNA
ttgtttgattgtttttgccc

SEQ ID NO: 56524 - DNA, 20 bp, synthetic construct
  misc_feature 1..20: note = chemically synthesized
  source 1..20: mol_type = other DNA
ttgattgtttttgcccaggc

SEQ ID NO: 56525 - DNA, 20 bp, synthetic construct
  misc_feature 1..20: note = chemically synthesized
  source 1..20: mol_type = other DNA
ccaggctggttttgaactct

SEQ ID NO: 56526 - DNA, 20 bp, synthetic construct
  misc_feature 1..20: note = chemically synthesized
  source 1..20: mol_type = other DNA
caggctggttttgaactctt

SEQ ID NO: 56527 - DNA, 20 bp, synthetic construct
  misc_feature 1..20: note = chemically synthesized
  source 1..20: mol_type = other DNA
ggttttgaactcttgggctc

SEQ ID NO: 56528 - DNA, 20 bp, synthetic construct
  misc_feature 1..20: note = chemically synthesized
  source 1..20: mol_type = other DNA
tcaagcaatcctcctaccct

SEQ ID NO: 56529 - DNA, 20 bp, synthetic construct
  misc_feature 1..20: note = chemically synthesized
  source 1..20: mol_type = other DNA
ctcctacccttggcctccca

SEQ ID NO: 56530 - DNA, 20 bp, synthetic construct
  misc_feature 1..20: note = chemically synthesized
  source 1..20: mol_type = other DNA
cccttggcctcccaaagtgt

SEQ ID NO: 56531 - DNA, 20 bp, synthetic construct
  misc_feature 1..20: note = chemically synthesized
  source 1..20: mol_type = other DNA
ccttggcctcccaaagtgtt

SEQ ID NO: 56532 - DNA, 20 bp, synthetic construct
  misc_feature 1..20: note = chemically synthesized
  source 1..20: mol_type = other DNA
ctcccaaagtgttgggatta

SEQ ID NO: 56533 - DNA, 20 bp, synthetic construct
  misc_feature 1..20: note = chemically synthesized
  source 1..20: mol_type = other DNA
tcccaaagtgttgggattat

SEQ ID NO: 56534 - DNA, 20 bp, synthetic construct
  misc_feature 1..20: note = chemically synthesized
  source 1..20: mol_type = other DNA
agtgttgggattataggtgt

SEQ ID NO: 56535 - DNA, 20 bp, synthetic construct
  misc_feature 1..20: note = chemically synthesized
  source 1..20: mol_type = other DNA
attataggtgtgagccacca

SEQ ID NO: 56536 - DNA, 20 bp, synthetic construct
  misc_feature 1..20: note = chemically synthesized
  source 1..20: mol_type = other DNA
gtgagccaccatggcccgtc

SEQ ID NO: 56537 - DNA, 20 bp, synthetic construct
  misc_feature 1..20: note = chemically synthesized
  source 1..20: mol_type = other DNA
attcttaattcctctaccct

SEQ ID NO: 56538 - DNA, 20 bp, synthetic construct
  misc_feature 1..20: note = chemically synthesized
  source 1..20: mol_type = other DNA
tcttaattcctctaccctga

SEQ ID NO: 56539 - DNA, 20 bp, synthetic construct
  misc_feature 1..20: note = chemically synthesized
  source 1..20: mol_type = other DNA
aattcctctaccctgagaga

SEQ ID NO: 56540 - DNA, 20 bp, synthetic construct
  misc_feature 1..20: note = chemically synthesized
  source 1..20: mol_type = other DNA
ttcctctaccctgagagata

SEQ ID NO: 56541 - DNA, 20 bp, synthetic construct
  misc_feature 1..20: note = chemically synthesized
  source 1..20: mol_type = other DNA
tcctctaccctgagagatag

SEQ ID NO: 56542 - DNA, 20 bp, synthetic construct
  misc_feature 1..20: note = chemically synthesized
  source 1..20: mol_type = other DNA
cctctaccctgagagataga

SEQ ID NO: 56543 - DNA, 20 bp, synthetic construct
  misc_feature 1..20: note = chemically synthesized
  source 1..20: mol_type = other DNA
cctgagagatagagggtcct

SEQ ID NO: 56544 - DNA, 20 bp, synthetic construct
  misc_feature 1..20: note = chemically synthesized
  source 1..20: mol_type = other DNA
gggtcctgagatgtgccgcc

SEQ ID NO: 56545 - DNA, 20 bp, synthetic construct
  misc_feature 1..20: note = chemically synthesized
  source 1..20: mol_type = other DNA
cagacctccctcctgaactg

SEQ ID NO: 56546 - DNA, 20 bp, synthetic construct
  misc_feature 1..20: note = chemically synthesized
  source 1..20: mol_type = other DNA
agacctccctcctgaactgc

SEQ ID NO: 56547 - DNA, 20 bp, synthetic construct
  misc_feature 1..20: note = chemically synthesized
  source 1..20: mol_type = other DNA
gaactgcaggacttatttcg

SEQ ID NO: 56548 - DNA, 20 bp, synthetic construct
  misc_feature 1..20: note = chemically synthesized
  source 1..20: mol_type = other DNA
ggacttatttcgtagctgtt

SEQ ID NO: 56549 - DNA, 20 bp, synthetic construct
  misc_feature 1..20: note = chemically synthesized
  source 1..20: mol_type = other DNA
acttatttcgtagctgttga

SEQ ID NO: 56550 - DNA, 20 bp, synthetic construct
  misc_feature 1..20: note = chemically synthesized
  source 1..20: mol_type = other DNA
cgtagctgttgagagtgtga

SEQ ID NO: 56551 - DNA, 20 bp, synthetic construct
  misc_feature 1..20: note = chemically synthesized
  source 1..20: mol_type = other DNA
agctgttgagagtgtgatgg

SEQ ID NO: 56552 - DNA, 20 bp, synthetic construct
  misc_feature 1..20: note = chemically synthesized
  source 1..20: mol_type = other DNA
gttgagagtgtgatggtaga

SEQ ID NO: 56553 - DNA, 20 bp, synthetic construct
  misc_feature 1..20: note = chemically synthesized
  source 1..20: mol_type = other DNA
ggtagatggctttctgctct

SEQ ID NO: 56554 - DNA, 20 bp, synthetic construct
  misc_feature 1..20: note = chemically synthesized
  source 1..20: mol_type = other DNA
ttctgctctcagccttctcc

SEQ ID NO: 56555 - DNA, 20 bp, synthetic construct
  misc_feature 1..20: note = chemically synthesized
  source 1..20: mol_type = other DNA
gccttctcctggcattgccc

SEQ ID NO: 56556 - DNA, 20 bp, synthetic construct
  misc_feature 1..20: note = chemically synthesized
  source 1..20: mol_type = other DNA
ccttctcctggcattgccct

SEQ ID NO: 56557 - DNA, 20 bp, synthetic construct
  misc_feature 1..20: note = chemically synthesized
  source 1..20: mol_type = other DNA
cctggcattgccctgggcta

SEQ ID NO: 56558 - DNA, 20 bp, synthetic construct
  misc_feature 1..20: note = chemically synthesized
  source 1..20: mol_type = other DNA
tggcattgccctgggctaaa

SEQ ID NO: 56559 - DNA, 20 bp, synthetic construct
  misc_feature 1..20: note = chemically synthesized
  source 1..20: mol_type = other DNA
gcattgccctgggctaaaga

SEQ ID NO: 56560 - DNA, 20 bp, synthetic construct
  misc_feature 1..20: note = chemically synthesized
  source 1..20: mol_type = other DNA
taaagagagtcgccttgatc

SEQ ID NO: 56561 - DNA, 20 bp, synthetic construct
  misc_feature 1..20: note = chemically synthesized
  source 1..20: mol_type = other DNA
aaagagagtcgccttgatca

SEQ ID NO: 56562 - DNA, 20 bp, synthetic construct
  misc_feature 1..20: note = chemically synthesized
  source 1..20: mol_type = other DNA
gatcaaggttacgctctccc

SEQ ID NO: 56563 - DNA, 20 bp, synthetic construct
  misc_feature 1..20: note = chemically synthesized
  source 1..20: mol_type = other DNA
atcaaggttacgctctcccc

SEQ ID NO: 56564 - DNA, 20 bp, synthetic construct
  misc_feature 1..20: note = chemically synthesized
  source 1..20: mol_type = other DNA
tcaaggttacgctctcccca

SEQ ID NO: 56565 - DNA, 20 bp, synthetic construct
  misc_feature 1..20: note = chemically synthesized
  source 1..20: mol_type = other DNA
ctgattcccttgtcccaact

SEQ ID NO: 56566 - DNA, 20 bp, synthetic construct
  misc_feature 1..20: note = chemically synthesized
  source 1..20: mol_type = other DNA
tcccaacttggaccaactct

SEQ ID NO: 56567 - DNA, 20 bp, synthetic construct
  misc_feature 1..20: note = chemically synthesized
  source 1..20: mol_type = other DNA
cccaacttggaccaactctg

SEQ ID NO: 56568 - DNA, 20 bp, synthetic construct
  misc_feature 1..20: note = chemically synthesized
  source 1..20: mol_type = other DNA
caacttggaccaactctgag

SEQ ID NO: 56569 - DNA, 20 bp, synthetic construct
  misc_feature 1..20: note = chemically synthesized
  source 1..20: mol_type = other DNA
caactctgaggagccatccc

SEQ ID NO: 56570 - DNA, 20 bp, synthetic construct
  misc_feature 1..20: note = chemically synthesized
  source 1..20: mol_type = other DNA
tgaggagccatccccagctt

SEQ ID NO: 56571 - DNA, 20 bp, synthetic construct
  misc_feature 1..20: note = chemically synthesized
  source 1..20: mol_type = other DNA
aggagccatccccagcttca

SEQ ID NO: 56572 - DNA, 20 bp, synthetic construct
  misc_feature 1..20: note = chemically synthesized
  source 1..20: mol_type = other DNA
cccagcttcagagctcgctg

SEQ ID NO: 56573 - DNA, 20 bp, synthetic construct
  misc_feature 1..20: note = chemically synthesized
  source 1..20: mol_type = other DNA
ccagcttcagagctcgctgt

SEQ ID NO: 56574 - DNA, 20 bp, synthetic construct
  misc_feature 1..20: note = chemically synthesized
  source 1..20: mol_type = other DNA
cagcttcagagctcgctgtg

SEQ ID NO: 56575 - DNA, 20 bp, synthetic construct
  misc_feature 1..20: note = chemically synthesized
  source 1..20: mol_type = other DNA
ttcagagctcgctgtggggt

SEQ ID NO: 56576 - DNA, 20 bp, synthetic construct
  misc_feature 1..20: note = chemically synthesized
  source 1..20: mol_type = other DNA
agctcgctgtggggttggat

SEQ ID NO: 56577 - DNA, 20 bp, synthetic construct
  misc_feature 1..20: note = chemically synthesized
  source 1..20: mol_type = other DNA
gctcgctgtggggttggatg

SEQ ID NO: 56578 - DNA, 20 bp, synthetic construct
  misc_feature 1..20: note = chemically synthesized
  source 1..20: mol_type = other DNA
cgctgtggggttggatgagg

SEQ ID NO: 56579 - DNA, 20 bp, synthetic construct
  misc_feature 1..20: note = chemically synthesized
  source 1..20: mol_type = other DNA
ggatgaggcagaatcacaac

SEQ ID NO: 56580 - DNA, 20 bp, synthetic construct
  misc_feature 1..20: note = chemically synthesized
  source 1..20: mol_type = other DNA
tcctgttccttcccttctac

SEQ ID NO: 56581 - DNA, 20 bp, synthetic construct
  misc_feature 1..20: note = chemically synthesized
  source 1..20: mol_type = other DNA
ttccttcccttctacaagta

SEQ ID NO: 56582 - DNA, 20 bp, synthetic construct
  misc_feature 1..20: note = chemically synthesized
  source 1..20: mol_type = other DNA
cttctacaagtatagttccc

SEQ ID NO: 56583 - DNA, 20 bp, synthetic construct
  misc_feature 1..20: note = chemically synthesized
  source 1..20: mol_type = other DNA
tctacaagtatagttcccca

SEQ ID NO: 56584 - DNA, 20 bp, synthetic construct
  misc_feature 1..20: note = chemically synthesized
  source 1..20: mol_type = other DNA
ctgcacgtgaatctccattt

SEQ ID NO: 56585 - DNA, 20 bp, synthetic construct
  misc_feature 1..20: note = chemically synthesized
  source 1..20: mol_type = other DNA
ctccatttcagcctgctttc

SEQ ID NO: 56586 - DNA, 20 bp, synthetic construct
  misc_feature 1..20: note = chemically synthesized
  source 1..20: mol_type = other DNA
tccatttcagcctgctttcc

SEQ ID NO: 56587 - DNA, 20 bp, synthetic construct
  misc_feature 1..20: note = chemically synthesized
  source 1..20: mol_type = other DNA
ccatttcagcctgctttcca

SEQ ID NO: 56588 - DNA, 20 bp, synthetic construct
  misc_feature 1..20: note = chemically synthesized
  source 1..20: mol_type = other DNA
ctgctttccagggaacccca

SEQ ID NO: 56589 - DNA, 20 bp, synthetic construct
  misc_feature 1..20: note = chemically synthesized
  source 1..20: mol_type = other DNA
gggaaccccatagataaata

SEQ ID NO: 56590 - DNA, 20 bp, synthetic construct
  misc_feature 1..20: note = chemically synthesized
  source 1..20: mol_type = other DNA
ggaaccccatagataaataa

SEQ ID NO: 56591 - DNA, 20 bp, synthetic construct
  misc_feature 1..20: note = chemically synthesized
  source 1..20: mol_type = other DNA
acactaacaattatatacct

SEQ ID NO: 56592 - DNA, 20 bp, synthetic construct
  misc_feature 1..20: note = chemically synthesized
  source 1..20: mol_type = other DNA
cactaacaattatatacctt

SEQ ID NO: 56593 - DNA, 20 bp, synthetic construct
  misc_feature 1..20: note = chemically synthesized
  source 1..20: mol_type = other DNA
cttttttttttttttcctga

SEQ ID NO: 56594 - DNA, 20 bp, synthetic construct
  misc_feature 1..20: note = chemically synthesized
  source 1..20: mol_type = other DNA
cagaatctttctctgtcacc

SEQ ID NO: 56595 - DNA, 20 bp, synthetic construct
  misc_feature 1..20: note = chemically synthesized
  source 1..20: mol_type = other DNA
agaatctttctctgtcacca

SEQ ID NO: 56596 - DNA, 20 bp, synthetic construct
  misc_feature 1..20: note = chemically synthesized
  source 1..20: mol_type = other DNA
tctttctctgtcaccaaggc

SEQ ID NO: 56597 - DNA, 20 bp, synthetic construct
  misc_feature 1..20: note = chemically synthesized
  source 1..20: mol_type = other DNA
tttctctgtcaccaaggctg

SEQ ID NO: 56598 - DNA, 20 bp, synthetic construct
  misc_feature 1..20: note = chemically synthesized
  source 1..20: mol_type = other DNA
ctgtcaccaaggctggagtg

SEQ ID NO: 56599 - DNA, 20 bp, synthetic construct
  misc_feature 1..20: note = chemically synthesized
  source 1..20: mol_type = other DNA
tcaccaaggctggagtgcag

SEQ ID NO: 56600 - DNA, 20 bp, synthetic construct
  misc_feature 1..20: note = chemically synthesized
  source 1..20: mol_type = other DNA
ggagtgcagtggtgtgattt

SEQ ID NO: 56601 - DNA, 20 bp, synthetic construct
  misc_feature 1..20: note = chemically synthesized
  source 1..20: mol_type = other DNA
tcactgcaacctctgcctcc

SEQ ID NO: 56602 - DNA, 20 bp, synthetic construct
  misc_feature 1..20: note = chemically synthesized
  source 1..20: mol_type = other DNA
cactgcaacctctgcctccc

SEQ ID NO: 56603 - DNA, 20 bp, synthetic construct
  misc_feature 1..20: note = chemically synthesized
  source 1..20: mol_type = other DNA
aacctctgcctcccgggttg

SEQ ID NO: 56604 - DNA, 20 bp, synthetic construct
  misc_feature 1..20: note = chemically synthesized
  source 1..20: mol_type = other DNA
ttgaagtgattctcctgccg

SEQ ID NO: 56605 - DNA, 20 bp, synthetic construct
  misc_feature 1..20: note = chemically synthesized
  source 1..20: mol_type = other DNA
attctcctgccgcagcctcc

SEQ ID NO: 56606 - DNA, 20 bp, synthetic construct
  misc_feature 1..20: note = chemically synthesized
  source 1..20: mol_type = other DNA
ttctcctgccgcagcctcct

SEQ ID NO: 56607 - DNA, 20 bp, synthetic construct
  misc_feature 1..20: note = chemically synthesized
  source 1..20: mol_type = other DNA
tcctgccgcagcctcctggg

SEQ ID NO: 56608 - DNA, 20 bp, synthetic construct
  misc_feature 1..20: note = chemically synthesized
  source 1..20: mol_type = other DNA
gccgcagcctcctgggtagc

SEQ ID NO: 56609 - DNA, 20 bp, synthetic construct
  misc_feature 1..20: note = chemically synthesized
  source 1..20: mol_type = other DNA
ccgcagcctcctgggtagct

SEQ ID NO: 56610 - DNA, 20 bp, synthetic construct
  misc_feature 1..20: note = chemically synthesized
  source 1..20: mol_type = other DNA
ctcctgggtagctgggatta

SEQ ID NO: 56611 - DNA, 20 bp, synthetic construct
  misc_feature 1..20: note = chemically synthesized
  source 1..20: mol_type = other DNA
tcctgggtagctgggattac

SEQ ID NO: 56612 - DNA, 20 bp, synthetic construct
  misc_feature 1..20: note = chemically synthesized
  source 1..20: mol_type = other DNA
caggcgcccgccaccatgcc

SEQ ID NO: 56613 - DNA, 20 bp, synthetic construct
  misc_feature 1..20: note = chemically synthesized
  source 1..20: mol_type = other DNA
gcccgccaccatgcctggct

SEQ ID NO: 56614 - DNA, 20 bp, synthetic construct
  misc_feature 1..20: note = chemically synthesized
  source 1..20: mol_type = other DNA
aagtttttgtatttttttat

SEQ ID NO: 56615 - DNA, 20 bp, synthetic construct
  misc_feature 1..20: note = chemically synthesized
  source 1..20: mol_type = other DNA
tgtatttttttattagtgac

SEQ ID NO: 56616 - DNA, 20 bp, synthetic construct
  misc_feature 1..20: note = chemically synthesized
  source 1..20: mol_type = other DNA
gtatttttttattagtgacg

SEQ ID NO: 56617 - DNA, 20 bp, synthetic construct
  misc_feature 1..20: note = chemically synthesized
  source 1..20: mol_type = other DNA
gtgacgaggtttcaccatgt

SEQ ID NO: 56618 - DNA, 20 bp, synthetic construct
  misc_feature 1..20: note = chemically synthesized
  source 1..20: mol_type = other DNA
cgaggtttcaccatgttggc

SEQ ID NO: 56619 - DNA, 20 bp, synthetic construct
  misc_feature 1..20: note = chemically synthesized
  source 1..20: mol_type = other DNA
gaggtttcaccatgttggcc

SEQ ID NO: 56620 - DNA, 20 bp, synthetic construct
  misc_feature 1..20: note = chemically synthesized
  source 1..20: mol_type = other DNA
tttcaccatgttggccaggc

SEQ ID NO: 56621 - DNA, 20 bp, synthetic construct
  misc_feature 1..20: note = chemically synthesized
  source 1..20: mol_type = other DNA
tggtctcaaactcctgacct

SEQ ID NO: 56622 - DNA, 20 bp, synthetic construct
  misc_feature 1..20: note = chemically synthesized
  source 1..20: mol_type = other DNA
ggtctcaaactcctgacctc

SEQ ID NO: 56623 - DNA, 20 bp, synthetic construct
  misc_feature 1..20: note = chemically synthesized
  source 1..20: mol_type = other DNA
ctcaggtgatccacctgcgt

SEQ ID NO: 56624 - DNA, 20 bp, synthetic construct
  misc_feature 1..20: note = chemically synthesized
  source 1..20: mol_type = other DNA
ccacctgcgttggcctccca

SEQ ID NO: 56625 - DNA, 20 bp, synthetic construct
  misc_feature 1..20: note = chemically synthesized
  source 1..20: mol_type = other DNA
gcgttggcctcccaaagtgc

SEQ ID NO: 56626 - DNA, 20 bp, synthetic construct
  misc_feature 1..20: note = chemically synthesized
  source 1..20: mol_type = other DNA
cgttggcctcccaaagtgct

SEQ ID NO: 56627 - DNA, 20 bp, synthetic construct
  misc_feature 1..20: note = chemically synthesized
  source 1..20: mol_type = other DNA
ctcccaaagtgctaggatta

SEQ ID NO: 56628 - DNA, 20 bp, synthetic construct
  misc_feature 1..20: note = chemically synthesized
  source 1..20: mol_type = other DNA
tcccaaagtgctaggattac

SEQ ID NO: 56629 - DNA, 20 bp, synthetic construct
  misc_feature 1..20: note = chemically synthesized
  source 1..20: mol_type = other DNA
agtgctaggattacaggcgt

SEQ ID NO: 56630 - DNA, 20 bp, synthetic construct
  misc_feature 1..20: note = chemically synthesized
  source 1..20: mol_type = other DNA
caggcgtgagccaccgcgcc

SEQ ID NO: 56631 - DNA, 20 bp, synthetic construct
  misc_feature 1..20: note = chemically synthesized
  source 1..20: mol_type = other DNA
ccgcgcccggcctactttct

SEQ ID NO: 56632 - DNA, 20 bp, synthetic construct
  misc_feature 1..20: note = chemically synthesized
  source 1..20: mol_type = other DNA
ccggcctactttctgagcct

SEQ ID NO: 56633 - DNA, 20 bp, synthetic construct
  misc_feature 1..20: note = chemically synthesized
  source 1..20: mol_type = other DNA
gagccttagctactctacct

SEQ ID NO: 56634 - DNA, 20 bp, synthetic construct
  misc_feature 1..20: note = chemically synthesized
  source 1..20: mol_type = other DNA
agccttagctactctaccta

SEQ ID NO: 56635 - DNA, 20 bp, synthetic construct
  misc_feature 1..20: note = chemically synthesized
  source 1..20: mol_type = other DNA
ccttagctactctacctaag

SEQ ID NO: 56636 - DNA, 20 bp, synthetic construct
  misc_feature 1..20: note = chemically synthesized
  source 1..20: mol_type = other DNA
tagctactctacctaaggag

SEQ ID NO: 56637 - DNA, 20 bp, synthetic construct
  misc_feature 1..20: note = chemically synthesized
  source 1..20: mol_type = other DNA
gctactctacctaaggagca

SEQ ID NO: 56638 - DNA, 20 bp, synthetic construct
  misc_feature 1..20: note = chemically synthesized
  source 1..20: mol_type = other DNA
gataataatttgcttctatt

SEQ ID NO: 56639 - DNA, 20 bp, synthetic construct
  misc_feature 1..20: note = chemically synthesized
  source 1..20: mol_type = other DNA
ataatttgcttctattaaga

SEQ ID NO: 56640 - DNA, 20 bp, synthetic construct
  misc_feature 1..20: note = chemically synthesized
  source 1..20: mol_type = other DNA
aatttgcttctattaagaca

SEQ ID NO: 56641 - DNA, 20 bp, synthetic construct
  misc_feature 1..20: note = chemically synthesized
  source 1..20: mol_type = other DNA
atttgcttctattaagacag

SEQ ID NO: 56642 - DNA, 20 bp, synthetic construct
  misc_feature 1..20: note = chemically synthesized
  source 1..20: mol_type = other DNA
ctaaataaaataacctctta

SEQ ID NO: 56643 - DNA, 20 bp, synthetic construct
  misc_feature 1..20: note = chemically synthesized
  source 1..20: mol_type = other DNA
taaagccactttaaactttc

SEQ ID NO: 56644 - DNA, 20 bp, synthetic construct
  misc_feature 1..20: note = chemically synthesized
  source 1..20: mol_type = other DNA
gtctgtgcctccattaattt

SEQ ID NO: 56645 - DNA, 20 bp, synthetic construct
  misc_feature 1..20: note = chemically synthesized
  source 1..20: mol_type = other DNA
tctgtgcctccattaatttc

SEQ ID NO: 56646 - DNA, 20 bp, synthetic construct
  misc_feature 1..20: note = chemically synthesized
  source 1..20: mol_type = other DNA
ctgtgcctccattaatttca

SEQ ID NO: 56647 - DNA, 20 bp, synthetic construct
  misc_feature 1..20: note = chemically synthesized
  source 1..20: mol_type = other DNA
gtgcctccattaatttcagg

SEQ ID NO: 56648 - DNA, 20 bp, synthetic construct
  misc_feature 1..20: note = chemically synthesized
  source 1..20: mol_type = other DNA
agaaattcatccttgataac

SEQ ID NO: 56649 - DNA, 20 bp, synthetic construct
  misc_feature 1..20: note = chemically synthesized
  source 1..20: mol_type = other DNA
ataacaagctgttatgatga

SEQ ID NO: 56650 - DNA, 20 bp, synthetic construct
  misc_feature 1..20: note = chemically synthesized
  source 1..20: mol_type = other DNA
aagcaaacatatttctacaa

SEQ ID NO: 56651 - DNA, 20 bp, synthetic construct
  misc_feature 1..20: note = chemically synthesized
  source 1..20: mol_type = other DNA
atatttctacaaaagatgtt

SEQ ID NO: 56652 - DNA, 20 bp, synthetic construct
  misc_feature 1..20: note = chemically synthesized
  source 1..20: mol_type = other DNA
gcctataaacaatcattttc

SEQ ID NO: 56653 - DNA, 20 bp, synthetic construct
  misc_feature 1..20: note = chemically synthesized
  source 1..20: mol_type = other DNA
atatattttttttttttttt

SEQ ID NO: 56654 - DNA, 20 bp, synthetic construct
  misc_feature 1..20: note = chemically synthesized
  source 1..20: mol_type = other DNA
atttttttttttttttcaga

SEQ ID NO: 56655 - DNA, 20 bp, synthetic construct
  misc_feature 1..20: note = chemically synthesized
  source 1..20: mol_type = other DNA
tggtgtctcattttgtcgcc

SEQ ID NO: 56656 - DNA, 20 bp, synthetic construct
  misc_feature 1..20: note = chemically synthesized
  source 1..20: mol_type = other DNA
ggtgtctcattttgtcgccc

SEQ ID NO: 56657 - DNA, 20 bp, synthetic construct
  misc_feature 1..20: note = chemically synthesized
  source 1..20: mol_type = other DNA
tctcattttgtcgcccaggc

SEQ ID NO: 56658 - DNA, 20 bp, synthetic construct
  misc_feature 1..20: note = chemically synthesized
  source 1..20: mol_type = other DNA
tcattttgtcgcccaggctg

SEQ ID NO: 56659 - DNA, 20 bp, synthetic construct
  misc_feature 1..20: note = chemically synthesized
  source 1..20: mol_type = other DNA
tcgcccaggctggagtgcaa

SEQ ID NO: 56660 - DNA, 20 bp, synthetic construct
  misc_feature 1..20: note = chemically synthesized
  source 1..20: mol_type = other DNA
ggagtgcaatggcgcaatct

SEQ ID NO: 56661 - DNA, 20 bp, synthetic construct
  misc_feature 1..20: note = chemically synthesized
  source 1..20: mol_type = other DNA
aatcttggctcaccacctcc

SEQ ID NO: 56662 - DNA, 20 bp, synthetic construct
  misc_feature 1..20: note = chemically synthesized
  source 1..20: mol_type = other DNA
atcttggctcaccacctccc

SEQ ID NO: 56663 - DNA, 20 bp, synthetic construct
  misc_feature 1..20: note = chemically synthesized
  source 1..20: mol_type = other DNA
gctcaccacctcccaggttc

SEQ ID NO: 56664 - DNA, 20 bp, synthetic construct
  misc_feature 1..20: note = chemically synthesized
  source 1..20: mol_type = other DNA
ttcaagcgattctcctgcct

SEQ ID NO: 56665 - DNA, 20 bp, synthetic construct
  misc_feature 1..20: note = chemically synthesized
  source 1..20: mol_type = other DNA
ttctcctgccttagcctcct

SEQ ID NO: 56666 - DNA, 20 bp, synthetic construct
  misc_feature 1..20: note = chemically synthesized
  source 1..20: mol_type = other DNA
tcctgccttagcctcctgag

SEQ ID NO: 56667 - DNA, 20 bp, synthetic construct
  misc_feature 1..20: note = chemically synthesized
  source 1..20: mol_type = other DNA
ccttagcctcctgagtagct

SEQ ID NO: 56668 - DNA, 20 bp, synthetic construct
  misc_feature 1..20: note = chemically synthesized
  source 1..20: mol_type = other DNA
ctcctgagtagctcagatta

SEQ ID NO: 56669 - DNA, 20 bp, synthetic construct
  misc_feature 1..20: note = chemically synthesized
  source 1..20: mol_type = other DNA
tcctgagtagctcagattac

SEQ ID NO: 56670 - DNA, 20 bp, synthetic construct
  misc_feature 1..20: note = chemically synthesized
  source 1..20: mol_type = other DNA
ctcagattacaggcatgcac

SEQ ID NO: 56671 - DNA, 20 bp, synthetic construct
  misc_feature 1..20: note = chemically synthesized
  source 1..20: mol_type = other DNA
tcagattacaggcatgcacc

SEQ ID NO: 56672 - DNA, 20 bp, synthetic construct
  misc_feature 1..20: note = chemically synthesized
  source 1..20: mol_type = other DNA
caggcatgcaccaggacacc

SEQ ID NO: 56673 - DNA, 20 bp, synthetic construct
  misc_feature 1..20: note = chemically synthesized
  source 1..20: mol_type = other DNA
ccagctaatttttgtatttt

SEQ ID NO: 56674 - DNA, 20 bp, synthetic construct
  misc_feature 1..20: note = chemically synthesized
  source 1..20: mol_type = other DNA
gctaatttttgtatttttag

SEQ ID NO: 56675 - DNA, 20 bp, synthetic construct
  misc_feature 1..20: note = chemically synthesized
  source 1..20: mol_type = other DNA
taatttttgtatttttagta

SEQ ID NO: 56676 - DNA, 20 bp, synthetic construct
  misc_feature 1..20: note = chemically synthesized
  source 1..20: mol_type = other DNA
ttttgtatttttagtagaga

SEQ ID NO: 56677 - DNA, 20 bp, synthetic construct
  misc_feature 1..20: note = chemically synthesized
  source 1..20: mol_type = other DNA
tttgtatttttagtagagac

SEQ ID NO: 56678 - DNA, 20 bp, synthetic construct
  misc_feature 1..20: note = chemically synthesized
  source 1..20: mol_type = other DNA
ttgtatttttagtagagaca

SEQ ID NO: 56679 - DNA, 20 bp, synthetic construct
  misc_feature 1..20: note = chemically synthesized
  source 1..20: mol_type = other DNA
gagacagggttttgccatgt

SEQ ID NO: 56680 - DNA, 20 bp, synthetic construct
  misc_feature 1..20: note = chemically synthesized
  source 1..20: mol_type = other DNA
cagggttttgccatgttggc

SEQ ID NO: 56681 - DNA, 20 bp, synthetic construct
  misc_feature 1..20: note = chemically synthesized
  source 1..20: mol_type = other DNA
agggttttgccatgttggcc

SEQ ID NO: 56682 - DNA, 20 bp, synthetic construct
  misc_feature 1..20: note = chemically synthesized
  source 1..20: mol_type = other DNA
ttttgccatgttggccaggc

SEQ ID NO: 56683 - DNA, 20 bp, synthetic construct
  misc_feature 1..20: note = chemically synthesized
  source 1..20: mol_type = other DNA
tggtcttgaactcctcacct

SEQ ID NO: 56684 - DNA, 20 bp, synthetic construct
  misc_feature 1..20: note = chemically synthesized
  source 1..20: mol_type = other DNA
ggtcttgaactcctcacctc

SEQ ID NO: 56685 - DNA, 20 bp, synthetic construct
  misc_feature 1..20: note = chemically synthesized
  source 1..20: mol_type = other DNA
ctcaggtgatccacccgcct

SEQ ID NO: 56686 - DNA, 20 bp, synthetic construct
  misc_feature 1..20: note = chemically synthesized
  source 1..20: mol_type = other DNA
ccacccgcctcagcctccca

SEQ ID NO: 56687 - DNA, 20 bp, synthetic construct
  misc_feature 1..20: note = chemically synthesized
  source 1..20: mol_type = other DNA
gcctcagcctcccaaagtgc

SEQ ID NO: 56688 - DNA, 20 bp, synthetic construct
  misc_feature 1..20: note = chemically synthesized
  source 1..20: mol_type = other DNA
cctcagcctcccaaagtgct

SEQ ID NO: 56689 - DNA, 20 bp, synthetic construct
  misc_feature 1..20: note = chemically synthesized
  source 1..20: mol_type = other DNA
ctcccaaagtgctgggatta

SEQ ID NO: 56690 - DNA, 20 bp, synthetic construct
  misc_feature 1..20: note = chemically synthesized
  source 1..20: mol_type = other DNA
tcccaaagtgctgggattac

SEQ ID NO: 56691 - DNA, 20 bp, synthetic construct
  misc_feature 1..20: note = chemically synthesized
  source 1..20: mol_type = other DNA
cccaaagtgctgggattaca

SEQ ID NO: 56692 - DNA, 20 bp, synthetic construct
  misc_feature 1..20: note = chemically synthesized
  source 1..20: mol_type = other DNA
aagtgctgggattacagggt

SEQ ID NO: 56693 - DNA, 20 bp, synthetic construct
  misc_feature 1..20: note = chemically synthesized
  source 1..20: mol_type = other DNA
acagggtgagccaccgtgcc

SEQ ID NO: 56694 - DNA, 20 bp, synthetic construct
  misc_feature 1..20: note = chemically synthesized
  source 1..20: mol_type = other DNA
tggcctatcctacatattaa

SEQ ID NO: 56695 - DNA, 20 bp, synthetic construct
  misc_feature 1..20: note = chemically synthesized
  source 1..20: mol_type = other DNA
taatagtttacttttttttt

SEQ ID NO: 56696 - DNA, 20 bp, synthetic construct
  misc_feature 1..20: note = chemically synthesized
  source 1..20: mol_type = other DNA
agtttactttttttttgaga

SEQ ID NO: 56697 - DNA, 20 bp, synthetic construct
  misc_feature 1..20: note = chemically synthesized
  source 1..20: mol_type = other DNA
tttactttttttttgagaca

SEQ ID NO: 56698 - DNA, 20 bp, synthetic construct
  misc_feature 1..20: note = chemically synthesized
  source 1..20: mol_type = other DNA
cagagtctcgttctgtcatt

SEQ ID NO: 56699 - DNA, 20 bp, synthetic construct
  misc_feature 1..20: note = chemically synthesized
  source 1..20: mol_type = other DNA
agagtctcgttctgtcattc

SEQ ID NO: 56700 - DNA, 20 bp, synthetic construct
  misc_feature 1..20: note = chemically synthesized
  source 1..20: mol_type = other DNA
tctcgttctgtcattcaggc

SEQ ID NO: 56701 - DNA, 20 bp, synthetic construct
  misc_feature 1..20: note = chemically synthesized
  source 1..20: mol_type = other DNA
tcgttctgtcattcaggctg

SEQ ID NO: 56702 - DNA, 20 bp, synthetic construct
  misc_feature 1..20: note = chemically synthesized
  source 1..20: mol_type = other DNA
ctgtcattcaggctggagtg

SEQ ID NO: 56703 - DNA, 20 bp, synthetic construct
  misc_feature 1..20: note = chemically synthesized
  source 1..20: mol_type = other DNA
tcattcaggctggagtgcag

SEQ ID NO: 56704 - DNA, 20 bp, synthetic construct
  misc_feature 1..20: note = chemically synthesized
  source 1..20: mol_type = other DNA
ggagtgcagtggtccgatct

SEQ ID NO: 56705 - DNA, 20 bp, synthetic construct
  misc_feature 1..20: note = chemically synthesized
  source 1..20: mol_type = other DNA
tcactgcaacctctgcctcc

SEQ ID NO: 56706 - DNA, 20 bp, synthetic construct
  misc_feature 1..20: note = chemically synthesized
  source 1..20: mol_type = other DNA
cactgcaacctctgcctccc

SEQ ID NO: 56707 - DNA, 20 bp, synthetic construct
  misc_feature 1..20: note = chemically synthesized
  source 1..20: mol_type = other DNA
aacctctgcctcccaggttc

SEQ ID NO: 56708 - DNA, 20 bp, synthetic construct
  misc_feature 1..20: note = chemically synthesized
  source 1..20: mol_type = other DNA
ttcaagcgattctcctgcct

SEQ ID NO: 56709 - DNA, 20 bp, synthetic construct
  misc_feature 1..20: note = chemically synthesized
  source 1..20: mol_type = other DNA
attctcctgcctcagcctcc

SEQ ID NO: 56710 - DNA, 20 bp, synthetic construct
  misc_feature 1..20: note = chemically synthesized
  source 1..20: mol_type = other DNA
ttctcctgcctcagcctccc

SEQ ID NO: 56711 - DNA, 20 bp, synthetic construct
  misc_feature 1..20: note = chemically synthesized
  source 1..20: mol_type = other DNA
tcctgcctcagcctcccagg

SEQ ID NO: 56712 - DNA, 20 bp, synthetic construct
  misc_feature 1..20: note = chemically synthesized
  source 1..20: mol_type = other DNA
cctcagcctcccaggtagct

SEQ ID NO: 56713 - DNA, 20 bp, synthetic construct
  misc_feature 1..20: note = chemically synthesized
  source 1..20: mol_type = other DNA
ctcccaggtagctgagacta

SEQ ID NO: 56714 - DNA, 20 bp, synthetic construct
  misc_feature 1..20: note = chemically synthesized
  source 1..20: mol_type = other DNA
tcccaggtagctgagactac

SEQ ID NO: 56715 - DNA, 20 bp, synthetic construct
  misc_feature 1..20: note = chemically synthesized
  source 1..20: mol_type = other DNA
ctgaccaatttttccatttt

SEQ ID NO: 56716 - DNA, 20 bp, synthetic construct
  misc_feature 1..20: note = chemically synthesized
  source 1..20: mol_type = other DNA
caatttttccatttttagta

SEQ ID NO: 56717 - DNA, 20 bp, synthetic construct
  misc_feature 1..20: note = chemically synthesized
  source 1..20: mol_type = other DNA
ttttccatttttagtaaaga

SEQ ID NO: 56718 - DNA, 20 bp, synthetic construct
  misc_feature 1..20: note = chemically synthesized
  source 1..20: mol_type = other DNA
tttccatttttagtaaagac

SEQ ID NO: 56719 - DNA, 20 bp, synthetic construct
  misc_feature 1..20: note = chemically synthesized
  source 1..20: mol_type = other DNA
aagacaggattttgcaatgt

SEQ ID NO: 56720 - DNA, 20 bp, synthetic construct
  misc_feature 1..20: note = chemically synthesized
  source 1..20: mol_type = other DNA
caggattttgcaatgttggc

SEQ ID NO: 56721 - DNA, 20 bp, synthetic construct
  misc_feature 1..20: note = chemically synthesized
  source 1..20: mol_type = other DNA
aggattttgcaatgttggcc

SEQ ID NO: 56722 - DNA, 20 bp, synthetic construct
  misc_feature 1..20: note = chemically synthesized
  source 1..20: mol_type = other DNA
ttttgcaatgttggccaggc

SEQ ID NO: 56723 - DNA, 20 bp, synthetic construct
  misc_feature 1..20: note = chemically synthesized
  source 1..20: mol_type = other DNA
tggttttgaactcctgacct

SEQ ID NO: 56724 - DNA, 20 bp, synthetic construct
  misc_feature 1..20: note = chemically synthesized
  source 1..20: mol_type = other DNA
ggttttgaactcctgacctc

SEQ ID NO: 56725 - DNA, 20 bp, synthetic construct
  misc_feature 1..20: note = chemically synthesized
  source 1..20: mol_type = other DNA
ctcaggtgatctacctacct

SEQ ID NO: 56726 - DNA, 20 bp, synthetic construct
  misc_feature 1..20: note = chemically synthesized
  source 1..20: mol_type = other DNA
ctacctaccttggcttccca

SEQ ID NO: 56727 - DNA, 20 bp, synthetic construct
  misc_feature 1..20: note = chemically synthesized
  source 1..20: mol_type = other DNA
accttggcttcccaaagtgc

SEQ ID NO: 56728 - DNA, 20 bp, synthetic construct
  misc_feature 1..20: note = chemically synthesized
  source 1..20: mol_type = other DNA
ccttggcttcccaaagtgct

SEQ ID NO: 56729 - DNA, 20 bp, synthetic construct
  misc_feature 1..20: note = chemically synthesized
  source 1..20: mol_type = other DNA
ttcccaaagtgctgggatta

SEQ ID NO: 56730 - DNA, 20 bp, synthetic construct
  misc_feature 1..20: note = chemically synthesized
  source 1..20: mol_type = other DNA
tcccaaagtgctgggattac

SEQ ID NO: 56731 - DNA, 20 bp, synthetic construct
  misc_feature 1..20: note = chemically synthesized
  source 1..20: mol_type = other DNA
agtgctgggattacaggcat

SEQ ID NO: 56732 - DNA, 20 bp, synthetic construct
  misc_feature 1..20: note = chemically synthesized
  source 1..20: mol_type = other DNA
caggcatgagcaaccacaac

SEQ ID NO: 56733 - DNA, 20 bp, synthetic construct
  misc_feature 1..20: note = chemically synthesized
  source 1..20: mol_type = other DNA
atgagcaaccacaactggcc

SEQ ID NO: 56734 - DNA, 20 bp, synthetic construct
  misc_feature 1..20: note = chemically synthesized
  source 1..20: mol_type = other DNA
tatatttcacctcctctatt

SEQ ID NO: 56735 - DNA, 20 bp, synthetic construct
  misc_feature 1..20: note = chemically synthesized
  source 1..20: mol_type = other DNA
cacctcctctattcagattt

SEQ ID NO: 56736 - DNA, 20 bp, synthetic construct
  misc_feature 1..20: note = chemically synthesized
  source 1..20: mol_type = other DNA
tattcagatttcagctccac

SEQ ID NO: 56737 - DNA, 20 bp, synthetic construct
  misc_feature 1..20: note = chemically synthesized
  source 1..20: mol_type = other DNA
attcagatttcagctccaca

SEQ ID NO: 56738 - DNA, 20 bp, synthetic construct
  misc_feature 1..20: note = chemically synthesized
  source 1..20: mol_type = other DNA
ttcagatttcagctccacaa

SEQ ID NO: 56739 - DNA, 20 bp, synthetic construct
  misc_feature 1..20: note = chemically synthesized
  source 1..20: mol_type = other DNA
agatttcagctccacaaggg

SEQ ID NO: 56740 - DNA, 20 bp, synthetic construct
  misc_feature 1..20: note = chemically synthesized
  source 1..20: mol_type = other DNA
gatttcagctccacaagggc

SEQ ID NO: 56741 - DNA, 20 bp, synthetic construct
  misc_feature 1..20: note = chemically synthesized
  source 1..20: mol_type = other DNA
atttcagctccacaagggca

SEQ ID NO: 56742 - DNA, 20 bp, synthetic construct
  misc_feature 1..20: note = chemically synthesized
  source 1..20: mol_type = other DNA
gtgtctgtgttgttcactga

SEQ ID NO: 56743 - DNA, 20 bp, synthetic construct
  misc_feature 1..20: note = chemically synthesized
  source 1..20: mol_type = other DNA
gtctgtgttgttcactgaca

SEQ ID NO: 56744 - DNA, 20 bp, synthetic construct
  misc_feature 1..20: note = chemically synthesized
  source 1..20: mol_type = other DNA
tctgtgttgttcactgacag

SEQ ID NO: 56745 - DNA, 20 bp, synthetic construct
  misc_feature 1..20: note = chemically synthesized
  source 1..20: mol_type = other DNA
ttcactgacagaggtatccc

SEQ ID NO: 56746 - DNA, 20 bp, synthetic construct
  misc_feature 1..20: note = chemically synthesized
  source 1..20: mol_type = other DNA
acagaggtatccctagcaca

SEQ ID NO: 56747 - DNA, 20 bp, synthetic construct
  misc_feature 1..20: note = chemically synthesized
  source 1..20: mol_type = other DNA
ggtatccctagcacatagaa

SEQ ID NO: 56748 - DNA, 20 bp, synthetic construct
  misc_feature 1..20: note = chemically synthesized
  source 1..20: mol_type = other DNA
ctagcacatagaacagtgta

SEQ ID NO: 56749 - DNA, 20 bp, synthetic construct
  misc_feature 1..20: note = chemically synthesized
  source 1..20: mol_type = other DNA
atagaacagtgtatagctcc

SEQ ID NO: 56750 - DNA, 20 bp, synthetic construct
  misc_feature 1..20: note = chemically synthesized
  source 1..20: mol_type = other DNA
gaacagtgtatagctcccag

SEQ ID NO: 56751 - DNA, 20 bp, synthetic construct
  misc_feature 1..20: note = chemically synthesized
  source 1..20: mol_type = other DNA
aacagtgtatagctcccagt

SEQ ID NO: 56752 - DNA, 20 bp, synthetic construct
  misc_feature 1..20: note = chemically synthesized
  source 1..20: mol_type = other DNA
tatagctcccagtaggtgct

SEQ ID NO: 56753 - DNA, 20 bp, synthetic construct
  misc_feature 1..20: note = chemically synthesized
  source 1..20: mol_type = other DNA
gctcccagtaggtgcttggt

SEQ ID NO: 56754 - DNA, 20 bp, synthetic construct
  misc_feature 1..20: note = chemically synthesized
  source 1..20: mol_type = other DNA
agtaggtgcttggtaagtaa

SEQ ID NO: 56755 - DNA, 20 bp, synthetic construct
  misc_feature 1..20: note = chemically synthesized
  source 1..20: mol_type = other DNA
ttggtaagtaacagctgaat

SEQ ID NO: 56756 - DNA, 20 bp, synthetic construct
  misc_feature 1..20: note = chemically synthesized
  source 1..20: mol_type = other DNA
tgaatgagtgaatatgctct

SEQ ID NO: 56757 - DNA, 20 bp, synthetic construct
  misc_feature 1..20: note = chemically synthesized
  source 1..20: mol_type = other DNA
gaatgagtgaatatgctctg

SEQ ID NO: 56758 - DNA, 20 bp, synthetic construct
  misc_feature 1..20: note = chemically synthesized
  source 1..20: mol_type = other DNA
tatgctctgaggtaaatgcg

SEQ ID NO: 56759 - DNA, 20 bp, synthetic construct
  misc_feature 1..20: note = chemically synthesized
  source 1..20: mol_type = other DNA
gaggtaaatgcgtggtctgt

SEQ ID NO: 56760 - DNA, 20 bp, synthetic construct
  misc_feature 1..20: note = chemically synthesized
  source 1..20: mol_type = other DNA
ggtaaatgcgtggtctgtga

SEQ ID NO: 56761 - DNA, 20 bp, synthetic construct
  misc_feature 1..20: note = chemically synthesized
  source 1..20: mol_type = other DNA
gtctgtgagagcaaataact

SEQ ID NO: 56762 - DNA, 20 bp, synthetic construct
  misc_feature 1..20: note = chemically synthesized
  source 1..20: mol_type = other DNA
tctgtgagagcaaataacta

SEQ ID NO: 56763 - DNA, 20 bp, synthetic construct
  misc_feature 1..20: note = chemically synthesized
  source 1..20: mol_type = other DNA
ctgtgagagcaaataactaa

SEQ ID NO: 56764 - DNA, 20 bp, synthetic construct
  misc_feature 1..20: note = chemically synthesized
  source 1..20: mol_type = other DNA
aataactaagggaccttccc

SEQ ID NO: 56765 - DNA, 20 bp, synthetic construct
  misc_feature 1..20: note = chemically synthesized
  source 1..20: mol_type = other DNA
taagggaccttccctagttt

SEQ ID NO: 56766 - DNA, 20 bp, synthetic construct
  misc_feature 1..20: note = chemically synthesized
  source 1..20: mol_type = other DNA
aagggaccttccctagtttt

SEQ ID NO: 56767 - DNA, 20 bp, synthetic construct
  misc_feature 1..20: note = chemically synthesized
  source 1..20: mol_type = other DNA
agggaccttccctagttttg

SEQ ID NO: 56768 - DNA, 20 bp, synthetic construct
  misc_feature 1..20: note = chemically synthesized
  source 1..20: mol_type = other DNA
accttccctagttttggggt

SEQ ID NO: 56769 - DNA, 20 bp, synthetic construct
  misc_feature 1..20: note = chemically synthesized
  source 1..20: mol_type = other DNA
ccttccctagttttggggtc

SEQ ID NO: 56770 - DNA, 20 bp, synthetic construct
  misc_feature 1..20: note = chemically synthesized
  source 1..20: mol_type = other DNA
cttccctagttttggggtca

SEQ ID NO: 56771 - DNA, 20 bp, synthetic construct
  misc_feature 1..20: note = chemically synthesized
  source 1..20: mol_type = other DNA
cctagttttggggtcaggga

SEQ ID NO: 56772 - DNA, 20 bp, synthetic construct
  misc_feature 1..20: note = chemically synthesized
  source 1..20: mol_type = other DNA
ctagttttggggtcagggaa

SEQ ID NO: 56773 - DNA, 20 bp, synthetic construct
  misc_feature 1..20: note = chemically synthesized
  source 1..20: mol_type = other DNA
tagttttggggtcagggaaa

SEQ ID NO: 56774 - DNA, 20 bp, synthetic construct
  misc_feature 1..20: note = chemically synthesized
  source 1..20: mol_type = other DNA
gggtcagggaaagggtctct

SEQ ID NO: 56775 - DNA, 20 bp, synthetic construct
  misc_feature 1..20: note = chemically synthesized
  source 1..20: mol_type = other DNA
ggtcagggaaagggtctctg

SEQ ID NO: 56776 - DNA, 20 bp, synthetic construct
  misc_feature 1..20: note = chemically synthesized
  source 1..20: mol_type = other DNA
cagggaaagggtctctgagg

SEQ ID NO: 56777 - DNA, 20 bp, synthetic construct
  misc_feature 1..20: note = chemically synthesized
  source 1..20: mol_type = other DNA
agggaaagggtctctgagga

SEQ ID NO: 56778 - DNA, 20 bp, synthetic construct
  misc_feature 1..20: note = chemically synthesized
  source 1..20: mol_type = other DNA
gggaaagggtctctgaggaa

SEQ ID NO: 56779 - DNA, 20 bp, synthetic construct
  misc_feature 1..20: note = chemically synthesized
  source 1..20: mol_type = other DNA
ggtctctgaggaagggatac

SEQ ID NO: 56780 - DNA, 20 bp, synthetic construct
  misc_feature 1..20: note = chemically synthesized
  source 1..20: mol_type = other DNA
aggaagggatactagtacct

SEQ ID NO: 56781 - DNA, 20 bp, synthetic construct
  misc_feature 1..20: note = chemically synthesized
  source 1..20: mol_type = other DNA
gaagggatactagtacctta

SEQ ID NO: 56782 - DNA, 20 bp, synthetic construct
  misc_feature 1..20: note = chemically synthesized
  source 1..20: mol_type = other DNA
agggatactagtaccttaga

SEQ ID NO: 56783 - DNA, 20 bp, synthetic construct
  misc_feature 1..20: note = chemically synthesized
  source 1..20: mol_type = other DNA
actagtaccttagagagtac

SEQ ID NO: 56784 - DNA, 20 bp, synthetic construct
  misc_feature 1..20: note = chemically synthesized
  source 1..20: mol_type = other DNA
accttagagagtactagtct

SEQ ID NO: 56785 - DNA, 20 bp, synthetic construct
  misc_feature 1..20: note = chemically synthesized
  source 1..20: mol_type = other DNA
cttagagagtactagtctta

SEQ ID NO: 56786 - DNA, 20 bp, synthetic construct
  misc_feature 1..20: note = chemically synthesized
  source 1..20: mol_type = other DNA
ttagagagtactagtcttag

SEQ ID NO: 56787 - DNA, 20 bp, synthetic construct
  misc_feature 1..20: note = chemically synthesized
  source 1..20: mol_type = other DNA
tagagagtactagtcttaga

SEQ ID NO: 56788 - DNA, 20 bp, synthetic construct
  misc_feature 1..20: note = chemically synthesized
  source 1..20: mol_type = other DNA
agagtactagtcttagaggg

SEQ ID NO: 56789 - DNA, 20 bp, synthetic construct
  misc_feature 1..20: note = chemically synthesized
  source 1..20: mol_type = other DNA
actagtcttagagggcagct

SEQ ID NO: 56790 - DNA, 20 bp, synthetic construct
  misc_feature 1..20: note = chemically synthesized
  source 1..20: mol_type = other DNA
ttagagggcagctgagactt

SEQ ID NO: 56791 - DNA, 20 bp, synthetic construct
  misc_feature 1..20: note = chemically synthesized
  source 1..20: mol_type = other DNA
tagagggcagctgagacttt

SEQ ID NO: 56792 - DNA, 20 bp, synthetic construct
  misc_feature 1..20: note = chemically synthesized
  source 1..20: mol_type = other DNA
agagggcagctgagacttta

SEQ ID NO: 56793 - DNA, 20 bp, synthetic construct
  misc_feature 1..20: note = chemically synthesized
  source 1..20: mol_type = other DNA
ggcagctgagactttagggt

SEQ ID NO: 56794 - DNA, 20 bp, synthetic construct
  misc_feature 1..20: note = chemically synthesized
  source 1..20: mol_type = other DNA
gcagctgagactttagggtg

SEQ ID NO: 56795 - DNA, 20 bp, synthetic construct
  misc_feature 1..20: note = chemically synthesized
  source 1..20: mol_type = other DNA
cagctgagactttagggtga

SEQ ID NO: 56796 - DNA, 20 bp, synthetic construct
  misc_feature 1..20: note = chemically synthesized
  source 1..20: mol_type = other DNA
gctgagactttagggtgagg

SEQ ID NO: 56797 - DNA, 20 bp, synthetic construct
  misc_feature 1..20: note = chemically synthesized
  source 1..20: mol_type = other DNA
ctgagactttagggtgaggg

SEQ ID NO: 56798 - DNA, 20 bp, synthetic construct
  misc_feature 1..20: note = chemically synthesized
  source 1..20: mol_type = other DNA
tgagactttagggtgaggga

SEQ ID NO: 56799 - DNA, 20 bp, synthetic construct
  misc_feature 1..20: note = chemically synthesized
  source 1..20: mol_type = other DNA
gagactttagggtgagggag

SEQ ID NO: 56800 - DNA, 20 bp, synthetic construct
  misc_feature 1..20: note = chemically synthesized
  source 1..20: mol_type = other DNA
aaatctatcatttgatttga

SEQ ID NO: 56801 - DNA, 20 bp, synthetic construct
  misc_feature 1..20: note = chemically synthesized
  source 1..20: mol_type = other DNA
ttgatttgacagtaaccatc

SEQ ID NO: 56802 - DNA, 20 bp, synthetic construct
  misc_feature 1..20: note = chemically synthesized
  source 1..20: mol_type = other DNA
tggctgtaactaataaaacg

SEQ ID NO: 56803 - DNA, 20 bp, synthetic construct
  misc_feature 1..20: note = chemically synthesized
  source 1..20: mol_type = other DNA
ggctgtaactaataaaacgt

SEQ ID NO: 56804 - DNA, 20 bp, synthetic construct
  misc_feature 1..20: note = chemically synthesized
  source 1..20: mol_type = other DNA
taactaataaaacgtaggca

SEQ ID NO: 56805 - DNA, 20 bp, synthetic construct
  misc_feature 1..20: note = chemically synthesized
  source 1..20: mol_type = other DNA
actaataaaacgtaggcaca

SEQ ID NO: 56806 - DNA, 20 bp, synthetic construct
  misc_feature 1..20: note = chemically synthesized
  source 1..20: mol_type = other DNA
taataaaacgtaggcacaga

SEQ ID NO: 56807 - DNA, 20 bp, synthetic construct
  misc_feature 1..20: note = chemically synthesized
  source 1..20: mol_type = other DNA
aataaaacgtaggcacagag

SEQ ID NO: 56808 - DNA, 20 bp, synthetic construct
  misc_feature 1..20: note = chemically synthesized
  source 1..20: mol_type = other DNA
ataaaacgtaggcacagaga

SEQ ID NO: 56809 - DNA, 20 bp, synthetic construct
  misc_feature 1..20: note = chemically synthesized
  source 1..20: mol_type = other DNA
aacgtaggcacagagagggc

SEQ ID NO: 56810 - DNA, 20 bp, synthetic construct
  misc_feature 1..20: note = chemically synthesized
  source 1..20: mol_type = other DNA
acgtaggcacagagagggca

SEQ ID NO: 56811 - DNA, 20 bp, synthetic construct
  misc_feature 1..20: note = chemically synthesized
  source 1..20: mol_type = other DNA
cgtaggcacagagagggcaa

SEQ ID NO: 56812 - DNA, 20 bp, synthetic construct
  misc_feature 1..20: note = chemically synthesized
  source 1..20: mol_type = other DNA
gcacagagagggcaagggat

SEQ ID NO: 56813 - DNA, 20 bp, synthetic construct
  misc_feature 1..20: note = chemically synthesized
  source 1..20: mol_type = other DNA
agagagggcaagggattgga

SEQ ID NO: 56814 - DNA, 20 bp, synthetic construct
  misc_feature 1..20: note = chemically synthesized
  source 1..20: mol_type = other DNA
agggcaagggattggacggt

SEQ ID NO: 56815 - DNA, 20 bp, synthetic construct
  misc_feature 1..20: note = chemically synthesized
  source 1..20: mol_type = other DNA
aagggattggacggtcagct

SEQ ID NO: 56816 - DNA, 20 bp, synthetic construct
  misc_feature 1..20: note = chemically synthesized
  source 1..20: mol_type = other DNA
agggattggacggtcagctc

SEQ ID NO: 56817 - DNA, 20 bp, synthetic construct
  misc_feature 1..20: note = chemically synthesized
  source 1..20: mol_type = other DNA
ggattggacggtcagctcag

SEQ ID NO: 56818 - DNA, 20 bp, synthetic construct
  misc_feature 1..20: note = chemically synthesized
  source 1..20: mol_type = other DNA
gattggacggtcagctcagg

SEQ ID NO: 56819 - DNA, 20 bp, synthetic construct
  misc_feature 1..20: note = chemically synthesized
  source 1..20: mol_type = other DNA
attggacggtcagctcagga

SEQ ID NO: 56820 - DNA, 20 bp, synthetic construct
  misc_feature 1..20: note = chemically synthesized
  source 1..20: mol_type = other DNA
tcagctcaggagggcacatc

SEQ ID NO: 56821 - DNA, 20 bp, synthetic construct
  misc_feature 1..20: note = chemically synthesized
  source 1..20: mol_type = other DNA
gctcaggagggcacatccag

SEQ ID NO: 56822 - DNA, 20 bp, synthetic construct
  misc_feature 1..20: note = chemically synthesized
  source 1..20: mol_type = other DNA
ctcaggagggcacatccagt

SEQ ID NO: 56823 - DNA, 20 bp, synthetic construct
  misc_feature 1..20: note = chemically synthesized
  source 1..20: mol_type = other DNA
ggagggcacatccagtgggc

SEQ ID NO: 56824 - DNA, 20 bp, synthetic construct
  misc_feature 1..20: note = chemically synthesized
  source 1..20: mol_type = other DNA
gagggcacatccagtgggcc

SEQ ID NO: 56825 - DNA, 20 bp, synthetic construct
  misc_feature 1..20: note = chemically synthesized
  source 1..20: mol_type = other DNA
catccagtgggccaggccat

SEQ ID NO: 56826 - DNA, 20 bp, synthetic construct
  misc_feature 1..20: note = chemically synthesized
  source 1..20: mol_type = other DNA
atccagtgggccaggccatt

SEQ ID NO: 56827 - DNA, 20 bp, synthetic construct
  misc_feature 1..20: note = chemically synthesized
  source 1..20: mol_type = other DNA
cagtgggccaggccattggg

SEQ ID NO: 56828 - DNA, 20 bp, synthetic construct
  misc_feature 1..20: note = chemically synthesized
  source 1..20: mol_type = other DNA
agtgggccaggccattggga

SEQ ID NO: 56829 - DNA, 20 bp, synthetic construct
  misc_feature 1..20: note = chemically synthesized
  source 1..20: mol_type = other DNA
aggccattgggaaggacccc

SEQ ID NO: 56830 - DNA, 20 bp, synthetic construct
  misc_feature 1..20: note = chemically synthesized
  source 1..20: mol_type = other DNA
ccattgggaaggacccccag

SEQ ID NO: 56831 - DNA, 20 bp, synthetic construct
  misc_feature 1..20: note = chemically synthesized
  source 1..20: mol_type = other DNA
gggaaggacccccagaagct

SEQ ID NO: 56832 - DNA, 20 bp, synthetic construct
  misc_feature 1..20: note = chemically synthesized
  source 1..20: mol_type = other DNA
ggaaggacccccagaagctc

SEQ ID NO: 56833 - DNA, 20 bp, synthetic construct
  misc_feature 1..20: note = chemically synthesized
  source 1..20: mol_type = other DNA
gcttctgccccctcctttct

SEQ ID NO: 56834 - DNA, 20 bp, synthetic construct
  misc_feature 1..20: note = chemically synthesized
  source 1..20: mol_type = other DNA
cttctgccccctcctttctc

SEQ ID NO: 56835 - DNA, 20 bp, synthetic construct
  misc_feature 1..20: note = chemically synthesized
  source 1..20: mol_type = other DNA
ccccctcctttctcaggaca

SEQ ID NO: 56836 - DNA, 20 bp, synthetic construct
  misc_feature 1..20: note = chemically synthesized
  source 1..20: mol_type = other DNA
tttctcaggacacagcgctg

SEQ ID NO: 56837 - DNA, 20 bp, synthetic construct
  misc_feature 1..20: note = chemically synthesized
  source 1..20: mol_type = other DNA
ttctcaggacacagcgctgc

SEQ ID NO: 56838 - DNA, 20 bp, synthetic construct
  misc_feature 1..20: note = chemically synthesized
  source 1..20: mol_type = other DNA
tctcaggacacagcgctgca

SEQ ID NO: 56839 - DNA, 20 bp, synthetic construct
  misc_feature 1..20: note = chemically synthesized
  source 1..20: mol_type = other DNA
caggacacagcgctgcaggg

SEQ ID NO: 56840 - DNA, 20 bp, synthetic construct
  misc_feature 1..20: note = chemically synthesized
  source 1..20: mol_type = other DNA
tgcagggcggtgactctcac

SEQ ID NO: 56841 - DNA, 20 bp, synthetic construct
  misc_feature 1..20: note = chemically synthesized
  source 1..20: mol_type = other DNA
tctcacgagccctttgccca

SEQ ID NO: 56842 - DNA, 20 bp, synthetic construct
  misc_feature 1..20: note = chemically synthesized
  source 1..20: mol_type = other DNA
catggatgcccgtgcctctc

SEQ ID NO: 56843 - DNA, 20 bp, synthetic construct
  misc_feature 1..20: note = chemically synthesized
  source 1..20: mol_type = other DNA
gtgcctctctggactccatc

SEQ ID NO: 56844 - DNA, 20 bp, synthetic construct
  misc_feature 1..20: note = chemically synthesized
  source 1..20: mol_type = other DNA
tgcctctctggactccatcc

SEQ ID NO: 56845 - DNA, 20 bp, synthetic construct
  misc_feature 1..20: note = chemically synthesized
  source 1..20: mol_type = other DNA
actccatccaggttctgtaa

SEQ ID NO: 56846 - DNA, 20 bp, synthetic construct
  misc_feature 1..20: note = chemically synthesized
  source 1..20: mol_type = other DNA
ctccatccaggttctgtaat

SEQ ID NO: 56847 - DNA, 20 bp, synthetic construct
  misc_feature 1..20: note = chemically synthesized
  source 1..20: mol_type = other DNA
catccaggttctgtaatagg

SEQ ID NO: 56848 - DNA, 20 bp, synthetic construct
  misc_feature 1..20: note = chemically synthesized
  source 1..20: mol_type = other DNA
tccaatactactgtgctatt

SEQ ID NO: 56849 - DNA, 20 bp, synthetic construct
  misc_feature 1..20: note = chemically synthesized
  source 1..20: mol_type = other DNA
ccaatactactgtgctattc

SEQ ID NO: 56850 - DNA, 20 bp, synthetic construct
  misc_feature 1..20: note = chemically synthesized
  source 1..20: mol_type = other DNA
tactactgtgctattcagga

SEQ ID NO: 56851 - DNA, 20 bp, synthetic construct
  misc_feature 1..20: note = chemically synthesized
  source 1..20: mol_type = other DNA
tgctattcaggaaagtattg

SEQ ID NO: 56852 - DNA, 20 bp, synthetic construct
  misc_feature 1..20: note = chemically synthesized
  source 1..20: mol_type = other DNA
tattcaggaaagtattgcag

SEQ ID NO: 56853 - DNA, 20 bp, synthetic construct
  misc_feature 1..20: note = chemically synthesized
  source 1..20: mol_type = other DNA
gaattaatttgtgccaattg

SEQ ID NO: 56854 - DNA, 20 bp, synthetic construct
  misc_feature 1..20: note = chemically synthesized
  source 1..20: mol_type = other DNA
attaatttgtgccaattgaa

SEQ ID NO: 56855 - DNA, 20 bp, synthetic construct
  misc_feature 1..20: note = chemically synthesized
  source 1..20: mol_type = other DNA
ccaattgaagagcatgacaa

SEQ ID NO: 56856 - DNA, 20 bp, synthetic construct
  misc_feature 1..20: note = chemically synthesized
  source 1..20: mol_type = other DNA
aagagcatgacaaaagtaca

SEQ ID NO: 56857 - DNA, 20 bp, synthetic construct
  misc_feature 1..20: note = chemically synthesized
  source 1..20: mol_type = other DNA
agagcatgacaaaagtacaa

SEQ ID NO: 56858 - DNA, 20 bp, synthetic construct
  misc_feature 1..20: note = chemically synthesized
  source 1..20: mol_type = other DNA
atgacaaaagtacaaaggaa

SEQ ID NO: 56859 - DNA, 20 bp, synthetic construct
  misc_feature 1..20: note = chemically synthesized
  source 1..20: mol_type = other DNA
ggctctcctcatgtcccctc

SEQ ID NO: 56860 - DNA, 20 bp, synthetic construct
  misc_feature 1..20: note = chemically synthesized
  source 1..20: mol_type = other DNA
gctctcctcatgtcccctca

SEQ ID NO: 56861 - DNA, 20 bp, synthetic construct
  misc_feature 1..20: note = chemically synthesized
  source 1..20: mol_type = other DNA
tcctcatgtcccctcaaggt

SEQ ID NO: 56862 - DNA, 20 bp, synthetic construct
  misc_feature 1..20: note = chemically synthesized
  source 1..20: mol_type = other DNA
aaggtcagtttcatccataa

SEQ ID NO: 56863 - DNA, 20 bp, synthetic construct
  misc_feature 1..20: note = chemically synthesized
  source 1..20: mol_type = other DNA
aggtcagtttcatccataac

SEQ ID NO: 56864 - DNA, 20 bp, synthetic construct
  misc_feature 1..20: note = chemically synthesized
  source 1..20: mol_type = other DNA
ttcatccataacaggtaaac

SEQ ID NO: 56865 - DNA, 20 bp, synthetic construct
  misc_feature 1..20: note = chemically synthesized
  source 1..20: mol_type = other DNA
tcatccataacaggtaaacg

SEQ ID NO: 56866 - DNA, 20 bp, synthetic construct
  misc_feature 1..20: note = chemically synthesized
  source 1..20: mol_type = other DNA
acaggtaaacgaggtccact

SEQ ID NO: 56867 - DNA, 20 bp, synthetic construct
  misc_feature 1..20: note = chemically synthesized
  source 1..20: mol_type = other DNA
gtccactcagcttctgtctg

SEQ ID NO: 56868 - DNA, 20 bp, synthetic construct
  misc_feature 1..20: note = chemically synthesized
  source 1..20: mol_type = other DNA
tccactcagcttctgtctgc

SEQ ID NO: 56869 - DNA, 20 bp, synthetic construct
  misc_feature 1..20: note = chemically synthesized
  source 1..20: mol_type = other DNA
ccactcagcttctgtctgca

SEQ ID NO: 56870 - DNA, 20 bp, synthetic construct
  misc_feature 1..20: note = chemically synthesized
  source 1..20: mol_type = other DNA
cactcagcttctgtctgcag

SEQ ID NO: 56871 - DNA, 20 bp, synthetic construct
  misc_feature 1..20: note = chemically synthesized
  source 1..20: mol_type = other DNA
cagcttctgtctgcaggggc

SEQ ID NO: 56872 - DNA, 20 bp, synthetic construct
  misc_feature 1..20: note = chemically synthesized
  source 1..20: mol_type = other DNA
agcttctgtctgcaggggct

SEQ ID NO: 56873 - DNA, 20 bp, synthetic construct
  misc_feature 1..20: note = chemically synthesized
  source 1..20: mol_type = other DNA
caggggctgggacgcttacc

SEQ ID NO: 56874 - DNA, 20 bp, synthetic construct
  misc_feature 1..20: note = chemically synthesized
  source 1..20: mol_type = other DNA
gctgggacgcttacctggtc

SEQ ID NO: 56875 - DNA, 20 bp, synthetic construct
  misc_feature 1..20: note = chemically synthesized
  source 1..20: mol_type = other DNA
gcttacctggtccagtctca

SEQ ID NO: 56876 - DNA, 20 bp, synthetic construct
  misc_feature 1..20: note = chemically synthesized
  source 1..20: mol_type = other DNA
cttacctggtccagtctcac

SEQ ID NO: 56877 - DNA, 20 bp, synthetic construct
  misc_feature 1..20: note = chemically synthesized
  source 1..20: mol_type = other DNA
tggtccagtctcacaggtta

SEQ ID NO: 56878 - DNA, 20 bp, synthetic construct
  misc_feature 1..20: note = chemically synthesized
  source 1..20: mol_type = other DNA
ggtccagtctcacaggttac

SEQ ID NO: 56879 - DNA, 20 bp, synthetic construct
  misc_feature 1..20: note = chemically synthesized
  source 1..20: mol_type = other DNA
gtccagtctcacaggttaca

SEQ ID NO: 56880 - DNA, 20 bp, synthetic construct
  misc_feature 1..20: note = chemically synthesized
  source 1..20: mol_type = other DNA
gttacagggaactgctttat

SEQ ID NO: 56881 - DNA, 20 bp, synthetic construct
  misc_feature 1..20: note = chemically synthesized
  source 1..20: mol_type = other DNA
ttacagggaactgctttatc

SEQ ID NO: 56882 - DNA, 20 bp, synthetic construct
  misc_feature 1..20: note = chemically synthesized
  source 1..20: mol_type = other DNA
tacagggaactgctttatca

SEQ ID NO: 56883 - DNA, 20 bp, synthetic construct
  misc_feature 1..20: note = chemically synthesized
  source 1..20: mol_type = other DNA
acagggaactgctttatcag

SEQ ID NO: 56884 - DNA, 20 bp, synthetic construct
  misc_feature 1..20: note = chemically synthesized
  source 1..20: mol_type = other DNA
gaactgctttatcaggggca

SEQ ID NO: 56885 - DNA, 20 bp, synthetic construct
  misc_feature 1..20: note = chemically synthesized
  source 1..20: mol_type = other DNA
ctgctttatcaggggcacgg

SEQ ID NO: 56886 - DNA, 20 bp, synthetic construct
  misc_feature 1..20: note = chemically synthesized
  source 1..20: mol_type = other DNA
ggggcacggaagtgttgctg

SEQ ID NO: 56887 - DNA, 20 bp, synthetic construct
  misc_feature 1..20: note = chemically synthesized
  source 1..20: mol_type = other DNA
gcacggaagtgttgctgtag

SEQ ID NO: 56888 - DNA, 20 bp, synthetic construct
  misc_feature 1..20: note = chemically synthesized
  source 1..20: mol_type = other DNA
ggaagtgttgctgtagtagt

SEQ ID NO: 56889 - DNA, 20 bp, synthetic construct
  misc_feature 1..20: note = chemically synthesized
  source 1..20: mol_type = other DNA
agtcagtatccaaaacccac

SEQ ID NO: 56890 - DNA, 20 bp, synthetic construct
  misc_feature 1..20: note = chemically synthesized
  source 1..20: mol_type = other DNA
gtatccaaaacccaccagta

SEQ ID NO: 56891 - DNA, 20 bp, synthetic construct
  misc_feature 1..20: note = chemically synthesized
  source 1..20: mol_type = other DNA
accagtatggacgctgtcca

SEQ ID NO: 56892 - DNA, 20 bp, synthetic construct
  misc_feature 1..20: note = chemically synthesized
  source 1..20: mol_type = other DNA
cagtatggacgctgtccaaa

SEQ ID NO: 56893 - DNA, 20 bp, synthetic construct
  misc_feature 1..20: note = chemically synthesized
  source 1..20: mol_type = other DNA
gctgtccaaagagaatccta

SEQ ID NO: 56894 - DNA, 20 bp, synthetic construct
  misc_feature 1..20: note = chemically synthesized
  source 1..20: mol_type = other DNA
aagagaatcctatggaaaaa

SEQ ID NO: 56895 - DNA, 20 bp, synthetic construct
  misc_feature 1..20: note = chemically synthesized
  source 1..20: mol_type = other DNA
atcctatggaaaaacagaac

SEQ ID NO: 56896 - DNA, 20 bp, synthetic construct
  misc_feature 1..20: note = chemically synthesized
  source 1..20: mol_type = other DNA
ggaaaaacagaacaagtttc

SEQ ID NO: 56897 - DNA, 20 bp, synthetic construct
  misc_feature 1..20: note = chemically synthesized
  source 1..20: mol_type = other DNA
gaaaaacagaacaagtttct

SEQ ID NO: 56898 - DNA, 20 bp, synthetic construct
  misc_feature 1..20: note = chemically synthesized
  source 1..20: mol_type = other DNA
aaaaacagaacaagtttctg

SEQ ID NO: 56899 - DNA, 20 bp, synthetic construct
  misc_feature 1..20: note = chemically synthesized
  source 1..20: mol_type = other DNA
tgaatgaatgcttttgccca

SEQ ID NO: 56900 - DNA, 20 bp, synthetic construct
  misc_feature 1..20: note = chemically synthesized
  source 1..20: mol_type = other DNA
tgcccaaagcctacaccttc

SEQ ID NO: 56901 - DNA, 20 bp, synthetic construct
  misc_feature 1..20: note = chemically synthesized
  source 1..20: mol_type = other DNA
ccaaagcctacaccttcaag

SEQ ID NO: 56902 - DNA, 20 bp, synthetic construct
  misc_feature 1..20: note = chemically synthesized
  source 1..20: mol_type = other DNA
aaagcctacaccttcaagaa

SEQ ID NO: 56903 - DNA, 20 bp, synthetic construct
  misc_feature 1..20: note = chemically synthesized
  source 1..20: mol_type = other DNA
ctacaccttcaagaagagtg

SEQ ID NO: 56904 - DNA, 20 bp, synthetic construct
  misc_feature 1..20: note = chemically synthesized
  source 1..20: mol_type = other DNA
cttcaagaagagtgtagcct

SEQ ID NO: 56905 - DNA, 20 bp, synthetic construct
  misc_feature 1..20: note = chemically synthesized
  source 1..20: mol_type = other DNA
caagaagagtgtagcctgag

SEQ ID NO: 56906 - DNA, 20 bp, synthetic construct
  misc_feature 1..20: note = chemically synthesized
  source 1..20: mol_type = other DNA
aagaagagtgtagcctgaga

SEQ ID NO: 56907 - DNA, 20 bp, synthetic construct
  misc_feature 1..20: note = chemically synthesized
  source 1..20: mol_type = other DNA
aggatttcacatgttgcctc

SEQ ID NO: 56908 - DNA, 20 bp, synthetic construct
  misc_feature 1..20: note = chemically synthesized
  source 1..20: mol_type = other DNA
atttcacatgttgcctctag

SEQ ID NO: 56909 - DNA, 20 bp, synthetic construct
  misc_feature 1..20: note = chemically synthesized
  source 1..20: mol_type = other DNA
tttcacatgttgcctctaga

SEQ ID NO: 56910 - DNA, 20 bp, synthetic construct
  misc_feature 1..20: note = chemically synthesized
  source 1..20: mol_type = other DNA
ttcacatgttgcctctagaa

SEQ ID NO: 56911 - DNA, 20 bp, synthetic construct
  misc_feature 1..20: note = chemically synthesized
  source 1..20: mol_type = other DNA
cacatgttgcctctagaagg

SEQ ID NO: 56912 - DNA, 20 bp, synthetic construct
  misc_feature 1..20: note = chemically synthesized
  source 1..20: mol_type = other DNA
ttgcctctagaagggagaac

SEQ ID NO: 56913 - DNA, 20 bp, synthetic construct
  misc_feature 1..20: note = chemically synthesized
  source 1..20: mol_type = other DNA
tgcctctagaagggagaact

SEQ ID NO: 56914 - DNA, 20 bp, synthetic construct
  misc_feature 1..20: note = chemically synthesized
  source 1..20: mol_type = other DNA
ctctagaagggagaactggg

SEQ ID NO: 56915 - DNA, 20 bp, synthetic construct
  misc_feature 1..20: note = chemically synthesized
  source 1..20: mol_type = other DNA
agaagggagaactgggtggc

SEQ ID NO: 56916 - DNA, 20 bp, synthetic construct
  misc_feature 1..20: note = chemically synthesized
  source 1..20: mol_type = other DNA
gaagggagaactgggtggct

SEQ ID NO: 56917 - DNA, 20 bp, synthetic construct
  misc_feature 1..20: note = chemically synthesized
  source 1..20: mol_type = other DNA
aagggagaactgggtggctg

SEQ ID NO: 56918 - DNA, 20 bp, synthetic construct
  misc_feature 1..20: note = chemically synthesized
  source 1..20: mol_type = other DNA
gggagaactgggtggctggg

SEQ ID NO: 56919 - DNA, 20 bp, synthetic construct
  misc_feature 1..20: note = chemically synthesized
  source 1..20: mol_type = other DNA
agaactgggtggctggggag

SEQ ID NO: 56920 - DNA, 20 bp, synthetic construct
  misc_feature 1..20: note = chemically synthesized
  source 1..20: mol_type = other DNA
gggtggctggggagaagtgt

SEQ ID NO: 56921 - DNA, 20 bp, synthetic construct
  misc_feature 1..20: note = chemically synthesized
  source 1..20: mol_type = other DNA
gtggctggggagaagtgtga

SEQ ID NO: 56922 - DNA, 20 bp, synthetic construct
  misc_feature 1..20: note = chemically synthesized
  source 1..20: mol_type = other DNA
tggctggggagaagtgtgag

SEQ ID NO: 56923 - DNA, 20 bp, synthetic construct
  misc_feature 1..20: note = chemically synthesized
  source 1..20: mol_type = other DNA
ggctggggagaagtgtgaga

SEQ ID NO: 56924 - DNA, 20 bp, synthetic construct
  misc_feature 1..20: note = chemically synthesized
  source 1..20: mol_type = other DNA
ctggggagaagtgtgagagg

SEQ ID NO: 56925 - DNA, 20 bp, synthetic construct
  misc_feature 1..20: note = chemically synthesized
  source 1..20: mol_type = other DNA
gtattatctttttttttttt

SEQ ID NO: 56926 - DNA, 20 bp, synthetic construct
  misc_feature 1..20: note = chemically synthesized
  source 1..20: mol_type = other DNA
tatcttttttttttttgaga

SEQ ID NO: 56927 - DNA, 20 bp, synthetic construct
  misc_feature 1..20: note = chemically synthesized
  source 1..20: mol_type = other DNA
atcttttttttttttgagac

SEQ ID NO: 56928 - DNA, 20 bp, synthetic construct
  misc_feature 1..20: note = chemically synthesized
  source 1..20: mol_type = other DNA
tttttttttgagacaggatc

SEQ ID NO: 56929 - DNA, 20 bp, synthetic construct
  misc_feature 1..20: note = chemically synthesized
  source 1..20: mol_type = other DNA
ttttgagacaggatctggct

SEQ ID NO: 56930 - DNA, 20 bp, synthetic construct
  misc_feature 1..20: note = chemically synthesized
  source 1..20: mol_type = other DNA
caggatctggctcagtaacc

SEQ ID NO: 56931 - DNA, 20 bp, synthetic construct
  misc_feature 1..20: note = chemically synthesized
  source 1..20: mol_type = other DNA
tctggctcagtaacccagcc

SEQ ID NO: 56932 - DNA, 20 bp, synthetic construct
  misc_feature 1..20: note = chemically synthesized
  source 1..20: mol_type = other DNA
tggctcagtaacccagcctg

SEQ ID NO: 56933 - DNA, 20 bp, synthetic construct
  misc_feature 1..20: note = chemically synthesized
  source 1..20: mol_type = other DNA
cagtaacccagcctggagtg

SEQ ID NO: 56934 - DNA, 20 bp, synthetic construct
  misc_feature 1..20: note = chemically synthesized
  source 1..20: mol_type = other DNA
taacccagcctggagtgcag

SEQ ID NO: 56935 - DNA, 20 bp, synthetic construct
  misc_feature 1..20: note = chemically synthesized
  source 1..20: mol_type = other DNA
ggagtgcagtggcgcaatct

SEQ ID NO: 56936 - DNA, 20 bp, synthetic construct
  misc_feature 1..20: note = chemically synthesized
  source 1..20: mol_type = other DNA
tcattgtgacctctacctcc

SEQ ID NO: 56937 - DNA, 20 bp, synthetic construct
  misc_feature 1..20: note = chemically synthesized
  source 1..20: mol_type = other DNA
cattgtgacctctacctcct

SEQ ID NO: 56938 - DNA, 20 bp, synthetic construct
  misc_feature 1..20: note = chemically synthesized
  source 1..20: mol_type = other DNA
ctcctgggatcctcccacct

SEQ ID NO: 56939 - DNA, 20 bp, synthetic construct
  misc_feature 1..20: note = chemically synthesized
  source 1..20: mol_type = other DNA
tcccacctcagcctcctgaa

SEQ ID NO: 56940 - DNA, 20 bp, synthetic construct
  misc_feature 1..20: note = chemically synthesized
  source 1..20: mol_type = other DNA
acctcagcctcctgaatagc

SEQ ID NO: 56941 - DNA, 20 bp, synthetic construct
  misc_feature 1..20: note = chemically synthesized
  source 1..20: mol_type = other DNA
cctcagcctcctgaatagct

SEQ ID NO: 56942 - DNA, 20 bp, synthetic construct
  misc_feature 1..20: note = chemically synthesized
  source 1..20: mol_type = other DNA
ctcctgaatagctgggacta

SEQ ID NO: 56943 - DNA, 20 bp, synthetic construct
  misc_feature 1..20: note = chemically synthesized
  source 1..20: mol_type = other DNA
tcctgaatagctgggactac

SEQ ID NO: 56944 - DNA, 20 bp, synthetic construct
  misc_feature 1..20: note = chemically synthesized
  source 1..20: mol_type = other DNA
caggtgtgtgccaccacatc

SEQ ID NO: 56945 - DNA, 20 bp, synthetic construct
  misc_feature 1..20: note = chemically synthesized
  source 1..20: mol_type = other DNA
tgtgtgccaccacatccagc

SEQ ID NO: 56946 - DNA, 20 bp, synthetic construct
  misc_feature 1..20: note = chemically synthesized
  source 1..20: mol_type = other DNA
ccagctagtttttgtatttt

SEQ ID NO: 56947 - DNA, 20 bp, synthetic construct
  misc_feature 1..20: note = chemically synthesized
  source 1..20: mol_type = other DNA
gctagtttttgtatttttag

SEQ ID NO: 56948 - DNA, 20 bp, synthetic construct
  misc_feature 1..20: note = chemically synthesized
  source 1..20: mol_type = other DNA
tagtttttgtatttttagta

SEQ ID NO: 56949 - DNA, 20 bp, synthetic construct
  misc_feature 1..20: note = chemically synthesized
  source 1..20: mol_type = other DNA
ttttgtatttttagtagaga

SEQ ID NO: 56950 - DNA, 20 bp, synthetic construct
  misc_feature 1..20: note = chemically synthesized
  source 1..20: mol_type = other DNA
tttgtatttttagtagagac

SEQ ID NO: 56951 - DNA, 20 bp, synthetic construct
  misc_feature 1..20: note = chemically synthesized
  source 1..20: mol_type = other DNA
ttgtatttttagtagagacg

SEQ ID NO: 56952 - DNA, 20 bp, synthetic construct
  misc_feature 1..20: note = chemically synthesized
  source 1..20: mol_type = other DNA
cggggtttcaccatgttgcc

SEQ ID NO: 56953 - DNA, 20 bp, synthetic construct
  misc_feature 1..20: note = chemically synthesized
  source 1..20: mol_type = other DNA
ggggtttcaccatgttgccc

SEQ ID NO: 56954 - DNA, 20 bp, synthetic construct
  misc_feature 1..20: note = chemically synthesized
  source 1..20: mol_type = other DNA
tttcaccatgttgcccaggc

SEQ ID NO: 56955 - DNA, 20 bp, synthetic construct
  misc_feature 1..20: note = chemically synthesized
  source 1..20: mol_type = other DNA
tggtctccatctcctgaact

SEQ ID NO: 56956 - DNA, 20 bp, synthetic construct
  misc_feature 1..20: note = chemically synthesized
  source 1..20: mol_type = other DNA
ggtctccatctcctgaactc

SEQ ID NO: 56957 - DNA, 20 bp, synthetic construct
  misc_feature 1..20: note = chemically synthesized
  source 1..20: mol_type = other DNA
ctcaggcaatcctcccacct

SEQ ID NO: 56958 - DNA, 20 bp, synthetic construct
  misc_feature 1..20: note = chemically synthesized
  source 1..20: mol_type = other DNA
cctcccacctcagcctccca

SEQ ID NO: 56959 - DNA, 20 bp, synthetic construct
  misc_feature 1..20: note = chemically synthesized
  source 1..20: mol_type = other DNA
acctcagcctcccaaagtgc

SEQ ID NO: 56960 - DNA, 20 bp, synthetic construct
  misc_feature 1..20: note = chemically synthesized
  source 1..20: mol_type = other DNA
cctcagcctcccaaagtgct

SEQ ID NO: 56961 - DNA, 20 bp, synthetic construct
  misc_feature 1..20: note = chemically synthesized
  source 1..20: mol_type = other DNA
ctcccaaagtgctgggatta

SEQ ID NO: 56962 - DNA, 20 bp, synthetic construct
  misc_feature 1..20: note = chemically synthesized
  source 1..20: mol_type = other DNA
tcccaaagtgctgggattac

SEQ ID NO: 56963 - DNA, 20 bp, synthetic construct
  misc_feature 1..20: note = chemically synthesized
  source 1..20: mol_type = other DNA
agtgctgggattacaggcat

SEQ ID NO: 56964 - DNA, 20 bp, synthetic construct
  misc_feature 1..20: note = chemically synthesized
  source 1..20: mol_type = other DNA
ctatttaaacacaaataatg

SEQ ID NO: 56965 - DNA, 20 bp, synthetic construct
  misc_feature 1..20: note = chemically synthesized
  source 1..20: mol_type = other DNA
aaacacaaataatgaagccc

SEQ ID NO: 56966 - DNA, 20 bp, synthetic construct
  misc_feature 1..20: note = chemically synthesized
  source 1..20: mol_type = other DNA
aagcccaagattctgaactc

SEQ ID NO: 56967 - DNA, 20 bp, synthetic construct
  misc_feature 1..20: note = chemically synthesized
  source 1..20: mol_type = other DNA
agcccaagattctgaactcc

SEQ ID NO: 56968 - DNA, 20 bp, synthetic construct
  misc_feature 1..20: note = chemically synthesized
  source 1..20: mol_type = other DNA
ccaagattctgaactccagg

SEQ ID NO: 56969 - DNA, 20 bp, synthetic construct
  misc_feature 1..20: note = chemically synthesized
  source 1..20: mol_type = other DNA
caagattctgaactccaggc

SEQ ID NO: 56970 - DNA, 20 bp, synthetic construct
  misc_feature 1..20: note = chemically synthesized
  source 1..20: mol_type = other DNA
ttctgaactccaggcaggcg

SEQ ID NO: 56971 - DNA, 20 bp, synthetic construct
  misc_feature 1..20: note = chemically synthesized
  source 1..20: mol_type = other DNA
tgaactccaggcaggcgcgg

SEQ ID NO: 56972 - DNA, 20 bp, synthetic construct
  misc_feature 1..20: note = chemically synthesized
  source 1..20: mol_type = other DNA
gtggctcacacctgtaatct

SEQ ID NO: 56973 - DNA, 20 bp, synthetic construct
  misc_feature 1..20: note = chemically synthesized
  source 1..20: mol_type = other DNA
cacctgtaatctcagcactt

SEQ ID NO: 56974 - DNA, 20 bp, synthetic construct
  misc_feature 1..20: note = chemically synthesized
  source 1..20: mol_type = other DNA
acctgtaatctcagcacttt

SEQ ID NO: 56975 - DNA, 20 bp, synthetic construct
  misc_feature 1..20: note = chemically synthesized
  source 1..20: mol_type = other DNA
ctgtaatctcagcactttgg

SEQ ID NO: 56976 - DNA, 20 bp, synthetic construct
  misc_feature 1..20: note = chemically synthesized
  source 1..20: mol_type = other DNA
tgtaatctcagcactttggg

SEQ ID NO: 56977 - DNA, 20 bp, synthetic construct
  misc_feature 1..20: note = chemically synthesized
  source 1..20: mol_type = other DNA
tctcagcactttgggaggcc

SEQ ID NO: 56978 - DNA, 20 bp, synthetic construct
  misc_feature 1..20: note = chemically synthesized
  source 1..20: mol_type = other DNA
ctcagcactttgggaggcca

SEQ ID NO: 56979 - DNA, 20 bp, synthetic construct
  misc_feature 1..20: note = chemically synthesized
  source 1..20: mol_type = other DNA
agcactttgggaggccaagg

SEQ ID NO: 56980 - DNA, 20 bp, synthetic construct
  misc_feature 1..20: note = chemically synthesized
  source 1..20: mol_type = other DNA
gcactttgggaggccaaggc

SEQ ID NO: 56981 - DNA, 20 bp, synthetic construct
  misc_feature 1..20: note = chemically synthesized
  source 1..20: mol_type = other DNA
ctttgggaggccaaggcagg

SEQ ID NO: 56982 - DNA, 20 bp, synthetic construct
  misc_feature 1..20: note = chemically synthesized
  source 1..20: mol_type = other DNA
ccaaggcaggcagatcacat

SEQ ID NO: 56983 - DNA, 20 bp, synthetic construct
  misc_feature 1..20: note = chemically synthesized
  source 1..20: mol_type = other DNA
caaggcaggcagatcacatg

SEQ ID NO: 56984 - DNA, 20 bp, synthetic construct
  misc_feature 1..20: note = chemically synthesized
  source 1..20: mol_type = other DNA
gcaggcagatcacatgaggt

SEQ ID NO: 56985 - DNA, 20 bp, synthetic construct
  misc_feature 1..20: note = chemically synthesized
  source 1..20: mol_type = other DNA
caggcagatcacatgaggtc

SEQ ID NO: 56986 - DNA, 20 bp, synthetic construct
  misc_feature 1..20: note = chemically synthesized
  source 1..20: mol_type = other DNA
ggcagatcacatgaggtcag

SEQ ID NO: 56987 - DNA, 20 bp, synthetic construct
  misc_feature 1..20: note = chemically synthesized
  source 1..20: mol_type = other DNA
tcacatgaggtcaggagttt

SEQ ID NO: 56988 - DNA, 20 bp, synthetic construct
  misc_feature 1..20: note = chemically synthesized
  source 1..20: mol_type = other DNA
tgaggtcaggagtttgagac

SEQ ID NO: 56989 - DNA, 20 bp, synthetic construct
  misc_feature 1..20: note = chemically synthesized
  source 1..20: mol_type = other DNA
tcaggagtttgagaccagcc

SEQ ID NO: 56990 - DNA, 20 bp, synthetic construct
  misc_feature 1..20: note = chemically synthesized
  source 1..20: mol_type = other DNA
tgagaccagcctggccaaca

SEQ ID NO: 56991 - DNA, 20 bp, synthetic construct
  misc_feature 1..20: note = chemically synthesized
  source 1..20: mol_type = other DNA
cgtttctaccaaaaaatata

SEQ ID NO: 56992 - DNA, 20 bp, synthetic construct
  misc_feature 1..20: note = chemically synthesized
  source 1..20: mol_type = other DNA
taccaaaaaatataaagaat

SEQ ID NO: 56993 - DNA, 20 bp, synthetic construct
  misc_feature 1..20: note = chemically synthesized
  source 1..20: mol_type = other DNA
aaaaaatataaagaattagc

SEQ ID NO: 56994 - DNA, 20 bp, synthetic construct
  misc_feature 1..20: note = chemically synthesized
  source 1..20: mol_type = other DNA
tataaagaattagccagatg

SEQ ID NO: 56995 - DNA, 20 bp, synthetic construct
  misc_feature 1..20: note = chemically synthesized
  source 1..20: mol_type = other DNA
aaagaattagccagatgtgg

SEQ ID NO: 56996 - DNA, 20 bp, synthetic construct
  misc_feature 1..20: note = chemically synthesized
  source 1..20: mol_type = other DNA
gtggtgcgtgactgtaatcc

SEQ ID NO: 56997 - DNA, 20 bp, synthetic construct
  misc_feature 1..20: note = chemically synthesized
  source 1..20: mol_type = other DNA
tgactgtaatcccagctact

SEQ ID NO: 56998 - DNA, 20 bp, synthetic construct
  misc_feature 1..20: note = chemically synthesized
  source 1..20: mol_type = other DNA
gactgtaatcccagctactc

SEQ ID NO: 56999 - DNA, 20 bp, synthetic construct
  misc_feature 1..20: note = chemically synthesized
  source 1..20: mol_type = other DNA
ctgtaatcccagctactcgg

SEQ ID NO: 57000 - DNA, 20 bp, synthetic construct
  misc_feature 1..20: note = chemically synthesized
  source 1..20: mol_type = other DNA
tgtaatcccagctactcggg

SEQ ID NO: 57001 - DNA, 20 bp, synthetic construct
  misc_feature 1..20: note = chemically synthesized
  source 1..20: mol_type = other DNA
tcccagctactcgggaggct

SEQ ID NO: 57002 - DNA, 20 bp, synthetic construct
  misc_feature 1..20: note = chemically synthesized
  source 1..20: mol_type = other DNA
cccagctactcgggaggcta

SEQ ID NO: 57003 - DNA, 20 bp, synthetic construct
  misc_feature 1..20: note = chemically synthesized
  source 1..20: mol_type = other DNA
gctactcgggaggctaaggc

SEQ ID NO: 57004 - DNA, 20 bp, synthetic construct
  misc_feature 1..20: note = chemically synthesized
  source 1..20: mol_type = other DNA
tactcgggaggctaaggcaa

SEQ ID NO: 57005 - DNA, 20 bp, synthetic construct
  misc_feature 1..20: note = chemically synthesized
  source 1..20: mol_type = other DNA
gcaagagaatcgcttgaacc

SEQ ID NO: 57006 - DNA, 20 bp, synthetic construct
  misc_feature 1..20: note = chemically synthesized
  source 1..20: mol_type = other DNA
caagagaatcgcttgaacct

SEQ ID NO: 57007 - DNA, 20 bp, synthetic construct
  misc_feature 1..20: note = chemically synthesized
  source 1..20: mol_type = other DNA
agagaatcgcttgaacctgg

SEQ ID NO: 57008 - DNA, 20 bp, synthetic construct
  misc_feature 1..20: note = chemically synthesized
  source 1..20: mol_type = other DNA
gagaatcgcttgaacctggg

SEQ ID NO: 57009 - DNA, 20 bp, synthetic construct
  misc_feature 1..20: note = chemically synthesized
  source 1..20: mol_type = other DNA
aatcgcttgaacctgggagg

SEQ ID NO: 57010 - DNA, 20 bp, synthetic construct
  misc_feature 1..20: note = chemically synthesized
  source 1..20: mol_type = other DNA
tcgcttgaacctgggaggcg

SEQ ID NO: 57011 - DNA, 20 bp, synthetic construct
  misc_feature 1..20: note = chemically synthesized
  source 1..20: mol_type = other DNA
cgcttgaacctgggaggcgg

SEQ ID NO: 57012 - DNA, 20 bp, synthetic construct
  misc_feature 1..20: note = chemically synthesized
  source 1..20: mol_type = other DNA
tgggaggcggaggttgccgt

SEQ ID NO: 57013 - DNA, 20 bp, synthetic construct
  misc_feature 1..20: note = chemically synthesized
  source 1..20: mol_type = other DNA
ggcggaggttgccgtgagcc

SEQ ID NO: 57014 - DNA, 20 bp, synthetic construct
  misc_feature 1..20: note = chemically synthesized
  source 1..20: mol_type = other DNA
gagattatgccactgcacta

SEQ ID NO: 57015 - DNA, 20 bp, synthetic construct
  misc_feature 1..20: note = chemically synthesized
  source 1..20: mol_type = other DNA
agattatgccactgcactac

SEQ ID NO: 57016 - DNA, 20 bp, synthetic construct
  misc_feature 1..20: note = chemically synthesized
  source 1..20: mol_type = other DNA
tatgccactgcactacaggc

SEQ ID NO: 57017 - DNA, 20 bp, synthetic construct
  misc_feature 1..20: note = chemically synthesized
  source 1..20: mol_type = other DNA
atgccactgcactacaggct

SEQ ID NO: 57018 - DNA, 20 bp, synthetic construct
  misc_feature 1..20: note = chemically synthesized
  source 1..20: mol_type = other DNA
ctgcactacaggctgggtga

SEQ ID NO: 57019 - DNA, 20 bp, synthetic construct
  misc_feature 1..20: note = chemically synthesized
  source 1..20: mol_type = other DNA
gcactacaggctgggtgaca

SEQ ID NO: 57020 - DNA, 20 bp, synthetic construct
  misc_feature 1..20: note = chemically synthesized
  source 1..20: mol_type = other DNA
tacaggctgggtgacagagc

SEQ ID NO: 57021 - DNA, 20 bp, synthetic construct
  misc_feature 1..20: note = chemically synthesized
  source 1..20: mol_type = other DNA
aaatcctgaaatccataaaa

SEQ ID NO: 57022 - DNA, 20 bp, synthetic construct
  misc_feature 1..20: note = chemically synthesized
  source 1..20: mol_type = other DNA
tcctgaaatccataaaatgg

SEQ ID NO: 57023 - DNA, 20 bp, synthetic construct
  misc_feature 1..20: note = chemically synthesized
  source 1..20: mol_type = other DNA
gactttttttttttaacctc

SEQ ID NO: 57024 - DNA, 20 bp, synthetic construct
  misc_feature 1..20: note = chemically synthesized
  source 1..20: mol_type = other DNA
tttttttttttaacctcaag

SEQ ID NO: 57025 - DNA, 20 bp, synthetic construct
  misc_feature 1..20: note = chemically synthesized
  source 1..20: mol_type = other DNA
acctcaagaagtatttgtcc

SEQ ID NO: 57026 - DNA, 20 bp, synthetic construct
  misc_feature 1..20: note = chemically synthesized
  source 1..20: mol_type = other DNA
tcaagaagtatttgtcctgg

SEQ ID NO: 57027 - DNA, 20 bp, synthetic construct
  misc_feature 1..20: note = chemically synthesized
  source 1..20: mol_type = other DNA
ttgtcctggaagaatgcata

SEQ ID NO: 57028 - DNA, 20 bp, synthetic construct
  misc_feature 1..20: note = chemically synthesized
  source 1..20: mol_type = other DNA
gaagaatgcatatggaacta

SEQ ID NO: 57029 - DNA, 20 bp, synthetic construct
  misc_feature 1..20: note = chemically synthesized
  source 1..20: mol_type = other DNA
tggaactacagtttgaaact

SEQ ID NO: 57030 - DNA, 20 bp, synthetic construct
  misc_feature 1..20: note = chemically synthesized
  source 1..20: mol_type = other DNA
acttggacttgcatatacca

SEQ ID NO: 57031 - DNA, 20 bp, synthetic construct
  misc_feature 1..20: note = chemically synthesized
  source 1..20: mol_type = other DNA
cttggacttgcatataccat

SEQ ID NO: 57032 - DNA, 20 bp, synthetic construct
  misc_feature 1..20: note = chemically synthesized
  source 1..20: mol_type = other DNA
gcatataccatgggttccct

SEQ ID NO: 57033 - DNA, 20 bp, synthetic construct
  misc_feature 1..20: note = chemically synthesized
  source 1..20: mol_type = other DNA
catataccatgggttccctc

SEQ ID NO: 57034 - DNA, 20 bp, synthetic construct
  misc_feature 1..20: note = chemically synthesized
  source 1..20: mol_type = other DNA
ccatgggttccctcaggcct

SEQ ID NO: 57035 - DNA, 20 bp, synthetic construct
  misc_feature 1..20: note = chemically synthesized
  source 1..20: mol_type = other DNA
catgggttccctcaggcctc

SEQ ID NO: 57036 - DNA, 20 bp, synthetic construct
  misc_feature 1..20: note = chemically synthesized
  source 1..20: mol_type = other DNA
atgggttccctcaggcctca

SEQ ID NO: 57037 - DNA, 20 bp, synthetic construct
  misc_feature 1..20: note = chemically synthesized
  source 1..20: mol_type = other DNA
tcttgcatttcctctgacat

SEQ ID NO: 57038 - DNA, 20 bp, synthetic construct
  misc_feature 1..20: note = chemically synthesized
  source 1..20: mol_type = other DNA
ttgcatttcctctgacatca

SEQ ID NO: 57039 - DNA, 20 bp, synthetic construct
  misc_feature 1..20: note = chemically synthesized
  source 1..20: mol_type = other DNA
tgacatcagagaatgcactc

SEQ ID NO: 57040 - DNA, 20 bp, synthetic construct
  misc_feature 1..20: note = chemically synthesized
  source 1..20: mol_type = other DNA
agagaatgcactccagcccc

SEQ ID NO: 57041 - DNA, 20 bp, synthetic construct
  misc_feature 1..20: note = chemically synthesized
  source 1..20: mol_type = other DNA
gagaatgcactccagcccct

SEQ ID NO: 57042 - DNA, 20 bp, synthetic construct
  misc_feature 1..20: note = chemically synthesized
  source 1..20: mol_type = other DNA
tgcactccagcccctaggac

SEQ ID NO: 57043 - DNA, 20 bp, synthetic construct
  misc_feature 1..20: note = chemically synthesized
  source 1..20: mol_type = other DNA
cccctaggacgagccccccc

SEQ ID NO: 57044 - DNA, 20 bp, synthetic construct
  misc_feature 1..20: note = chemically synthesized
  source 1..20: mol_type = other DNA
ccctaggacgagcccccccc

SEQ ID NO: 57045 - DNA, 20 bp, synthetic construct
  misc_feature 1..20: note = chemically synthesized
  source 1..20: mol_type = other DNA
cctaggacgagcccccccca

SEQ ID NO: 57046 - DNA, 20 bp, synthetic construct
  misc_feature 1..20: note = chemically synthesized
  source 1..20: mol_type = other DNA
gagccccccccagggaaaca

SEQ ID NO: 57047 - DNA, 20 bp, synthetic construct
  misc_feature 1..20: note = chemically synthesized
  source 1..20: mol_type = other DNA
aacatggcctgcatttccat

SEQ ID NO: 57048 - DNA, 20 bp, synthetic construct
  misc_feature 1..20: note = chemically synthesized
  source 1..20: mol_type = other DNA
ccatcagaattgctctctgt

SEQ ID NO: 57049 - DNA, 20 bp, synthetic construct
  misc_feature 1..20: note = chemically synthesized
  source 1..20: mol_type = other DNA
catcagaattgctctctgta

SEQ ID NO: 57050 - DNA, 20 bp, synthetic construct
  misc_feature 1..20: note = chemically synthesized
  source 1..20: mol_type = other DNA
gctctctgtaaggatgtata

SEQ ID NO: 57051 - DNA, 20 bp, synthetic construct
  misc_feature 1..20: note = chemically synthesized
  source 1..20: mol_type = other DNA
tgtaaggatgtatatagctt

SEQ ID NO: 57052 - DNA, 20 bp, synthetic construct
  misc_feature 1..20: note = chemically synthesized
  source 1..20: mol_type = other DNA
gtatcctctctactttgaaa

SEQ ID NO: 57053 - DNA, 20 bp, synthetic construct
  misc_feature 1..20: note = chemically synthesized
  source 1..20: mol_type = other DNA
atcctctctactttgaaaca

SEQ ID NO: 57054 - DNA, 20 bp, synthetic construct
  misc_feature 1..20: note = chemically synthesized
  source 1..20: mol_type = other DNA
tactttgaaacagagtatct

SEQ ID NO: 57055 - DNA, 20 bp, synthetic construct
  misc_feature 1..20: note = chemically synthesized
  source 1..20: mol_type = other DNA
acaaaccacttcccctttaa

SEQ ID NO: 57056 - DNA, 20 bp, synthetic construct
  misc_feature 1..20: note = chemically synthesized
  source 1..20: mol_type = other DNA
cacttcccctttaaaagtac

SEQ ID NO: 57057 - DNA, 20 bp, synthetic construct
  misc_feature 1..20: note = chemically synthesized
  source 1..20: mol_type = other DNA
actagatatatctttcactg

SEQ ID NO: 57058 - DNA, 20 bp, synthetic construct
  misc_feature 1..20: note = chemically synthesized
  source 1..20: mol_type = other DNA
tatatctttcactgtggaaa

SEQ ID NO: 57059 - DNA, 20 bp, synthetic construct
  misc_feature 1..20: note = chemically synthesized
  source 1..20: mol_type = other DNA
atatctttcactgtggaaat

SEQ ID NO: 57060 - DNA, 20 bp, synthetic construct
  misc_feature 1..20: note = chemically synthesized
  source 1..20: mol_type = other DNA
tggaaataggtgtcaaccgc

SEQ ID NO: 57061 - DNA, 20 bp, synthetic construct
  misc_feature 1..20: note = chemically synthesized
  source 1..20: mol_type = other DNA
aataggtgtcaaccgccagt

SEQ ID NO: 57062 - DNA, 20 bp, synthetic construct
  misc_feature 1..20: note = chemically synthesized
  source 1..20: mol_type = other DNA
ataggtgtcaaccgccagtc

SEQ ID NO: 57063 - DNA, 20 bp, synthetic construct
  misc_feature 1..20: note = chemically synthesized
  source 1..20: mol_type = other DNA
ggatgccttttatcccgtga

SEQ ID NO: 57064 - DNA, 20 bp, synthetic construct
  misc_feature 1..20: note = chemically synthesized
  source 1..20: mol_type = other DNA
tgccttttatcccgtgatgg

SEQ ID NO: 57065 - DNA, 20 bp, synthetic construct
  misc_feature 1..20: note = chemically synthesized
  source 1..20: mol_type = other DNA
tttatcccgtgatggtggaa

SEQ ID NO: 57066 - DNA, 20 bp, synthetic construct
  misc_feature 1..20: note = chemically synthesized
  source 1..20: mol_type = other DNA
tagtgatttctcaccgaaat

SEQ ID NO: 57067 - DNA, 20 bp, synthetic construct
  misc_feature 1..20: note = chemically synthesized
  source 1..20: mol_type = other DNA
agtgatttctcaccgaaatc

SEQ ID NO: 57068 - DNA, 20 bp, synthetic construct
  misc_feature 1..20: note = chemically synthesized
  source 1..20: mol_type = other DNA
gtgatttctcaccgaaatca

SEQ ID NO: 57069 - DNA, 20 bp, synthetic construct
  misc_feature 1..20: note = chemically synthesized
  source 1..20: mol_type = other DNA
gatttctcaccgaaatcagg

SEQ ID NO: 57070 - DNA, 20 bp, synthetic construct
  misc_feature 1..20: note = chemically synthesized
  source 1..20: mol_type = other DNA
tttctcaccgaaatcaggga

SEQ ID NO: 57071 - DNA, 20 bp, synthetic construct
  misc_feature 1..20: note = chemically synthesized
  source 1..20: mol_type = other DNA
tcagggagagccactaactc

SEQ ID NO: 57072 - DNA, 20 bp, synthetic construct
  misc_feature 1..20: note = chemically synthesized
  source 1..20: mol_type = other DNA
aactctggcctctatcaacc

SEQ ID NO: 57073 - DNA, 20 bp, synthetic construct
  misc_feature 1..20: note = chemically synthesized
  source 1..20: mol_type = other DNA
ctctggcctctatcaaccca

SEQ ID NO: 57074 - DNA, 20 bp, synthetic construct
  misc_feature 1..20: note = chemically synthesized
  source 1..20: mol_type = other DNA
ctggcctctatcaacccaga

SEQ ID NO: 57075 - DNA, 20 bp, synthetic construct
  misc_feature 1..20: note = chemically synthesized
  source 1..20: mol_type = other DNA
atcaacccagagagattgca

SEQ ID NO: 57076 - DNA, 20 bp, synthetic construct
  misc_feature 1..20: note = chemically synthesized
  source 1..20: mol_type = other DNA
gagattgcatggttcttcaa

SEQ ID NO: 57077 - DNA, 20 bp, synthetic construct
  misc_feature 1..20: note = chemically synthesized
  source 1..20: mol_type = other DNA
gattgcatggttcttcaatg

SEQ ID NO: 57078 - DNA, 20 bp, synthetic construct
  misc_feature 1..20: note = chemically synthesized
  source 1..20: mol_type = other DNA
catggttcttcaatggagat

SEQ ID NO: 57079 - DNA, 20 bp, synthetic construct
  misc_feature 1..20: note = chemically synthesized
  source 1..20: mol_type = other DNA
ttcaatggagatcagatgtt

SEQ ID NO: 57080 - DNA, 20 bp, synthetic construct
  misc_feature 1..20: note = chemically synthesized
  source 1..20: mol_type = other DNA
cacttcatctttttattttt

SEQ ID NO: 57081 - DNA, 20 bp, synthetic construct
  misc_feature 1..20: note = chemically synthesized
  source 1..20: mol_type = other DNA
ttttattttttagaatcatg

SEQ ID NO: 57082 - DNA, 20 bp, synthetic construct
  misc_feature 1..20: note = chemically synthesized
  source 1..20: mol_type = other DNA
attttttagaatcatgcggc

SEQ ID NO: 57083 - DNA, 20 bp, synthetic construct
  misc_feature 1..20: note = chemically synthesized
  source 1..20: mol_type = other DNA
ttttttagaatcatgcggct

SEQ ID NO: 57084 - DNA, 20 bp, synthetic construct
  misc_feature 1..20: note = chemically synthesized
  source 1..20: mol_type = other DNA
tagaatcatgcggctgggtg

SEQ ID NO: 57085 - DNA, 20 bp, synthetic construct
  misc_feature 1..20: note = chemically synthesized
  source 1..20: mol_type = other DNA
aatcatgcggctgggtgtag

SEQ ID NO: 57086 - DNA, 20 bp, synthetic construct
  misc_feature 1..20: note = chemically synthesized
  source 1..20: mol_type = other DNA
gtggctcacgcctgtaatcc

SEQ ID NO: 57087 - DNA, 20 bp, synthetic construct
  misc_feature 1..20: note = chemically synthesized
  source 1..20: mol_type = other DNA
acgcctgtaatcctagcact

SEQ ID NO: 57088 - DNA, 20 bp, synthetic construct
  misc_feature 1..20: note = chemically synthesized
  source 1..20: mol_type = other DNA
cgcctgtaatcctagcactt

SEQ ID NO: 57089 - DNA, 20 bp, synthetic construct
  misc_feature 1..20: note = chemically synthesized
  source 1..20: mol_type = other DNA
gcctgtaatcctagcactta

SEQ ID NO: 57090 - DNA, 20 bp, synthetic construct
  misc_feature 1..20: note = chemically synthesized
  source 1..20: mol_type = other DNA
ctgtaatcctagcacttagg

SEQ ID NO: 57091 - DNA, 20 bp, synthetic construct
  misc_feature 1..20: note = chemically synthesized
  source 1..20: mol_type = other DNA
tgtaatcctagcacttaggg

SEQ ID NO: 57092 - DNA, 20 bp, synthetic construct
  misc_feature 1..20: note = chemically synthesized
  source 1..20: mol_type = other DNA
tcctagcacttagggaggcc

SEQ ID NO: 57093 - DNA, 20 bp, synthetic construct
  misc_feature 1..20: note = chemically synthesized
  source 1..20: mol_type = other DNA
cctagcacttagggaggcca

SEQ ID NO: 57094 - DNA, 20 bp, synthetic construct
  misc_feature 1..20: note = chemically synthesized
  source 1..20: mol_type = other DNA
agcacttagggaggccaagg

SEQ ID NO: 57095 - DNA, 20 bp, synthetic construct
  misc_feature 1..20: note = chemically synthesized
  source 1..20: mol_type = other DNA
gcacttagggaggccaaggc

SEQ ID NO: 57096 - DNA, 20 bp, synthetic construct
  misc_feature 1..20: note = chemically synthesized
  source 1..20: mol_type = other DNA
cttagggaggccaaggcagg

SEQ ID NO: 57097 - DNA, 20 bp, synthetic construct
  misc_feature 1..20: note = chemically synthesized
  source 1..20: mol_type = other DNA
ggccaaggcaggcagatcat

SEQ ID NO: 57098 - DNA, 20 bp, synthetic construct
  misc_feature 1..20: note = chemically synthesized
  source 1..20: mol_type = other DNA
gccaaggcaggcagatcatg

SEQ ID NO: 57099 - DNA, 20 bp, synthetic construct
  misc_feature 1..20: note = chemically synthesized
  source 1..20: mol_type = other DNA
aggcaggcagatcatgaggt

SEQ ID NO: 57100 - DNA, 20 bp, synthetic construct
  misc_feature 1..20: note = chemically synthesized
  source 1..20: mol_type = other DNA
ggcaggcagatcatgaggtc

SEQ ID NO: 57101 - DNA, 20 bp, synthetic construct
  misc_feature 1..20: note = chemically synthesized
  source 1..20: mol_type = other DNA
caggcagatcatgaggtcag

SEQ ID NO: 57102 - DNA, 20 bp, synthetic construct
  misc_feature 1..20: note = chemically synthesized
  source 1..20: mol_type = other DNA
gatcatgaggtcaggagttc

SEQ ID NO: 57103 - DNA, 20 bp, synthetic construct
  misc_feature 1..20: note = chemically synthesized
  source 1..20: mol_type = other DNA
tgaggtcaggagttcgagac

SEQ ID NO: 57104 - DNA, 20 bp, synthetic construct
  misc_feature 1..20: note = chemically synthesized
  source 1..20: mol_type = other DNA
tcaggagttcgagaccagcc

SEQ ID NO: 57105 - DNA, 20 bp, synthetic construct
  misc_feature 1..20: note = chemically synthesized
  source 1..20: mol_type = other DNA
cgagaccagcctagtcaaca

SEQ ID NO: 57106 - DNA, 20 bp, synthetic construct
  misc_feature 1..20: note = chemically synthesized
  source 1..20: mol_type = other DNA
actaaaaatacaaaaaaaat

SEQ ID NO: 57107 - DNA, 20 bp, synthetic construct
  misc_feature 1..20: note = chemically synthesized
  source 1..20: mol_type = other DNA
aaaatacaaaaaaaattagc

SEQ ID NO: 57108 - DNA, 20 bp, synthetic construct
  misc_feature 1..20: note = chemically synthesized
  source 1..20: mol_type = other DNA
aaatacaaaaaaaattagct

SEQ ID NO: 57109 - DNA, 20 bp, synthetic construct
  misc_feature 1..20: note = chemically synthesized
  source 1..20: mol_type = other DNA
caaaaaaaattagctgggca

SEQ ID NO: 57110 - DNA, 20 bp, synthetic construct
  misc_feature 1..20: note = chemically synthesized
  source 1..20: mol_type = other DNA
aaaaaattagctgggcatgg

SEQ ID NO: 57111 - DNA, 20 bp, synthetic construct
  misc_feature 1..20: note = chemically synthesized
  source 1..20: mol_type = other DNA
aaattagctgggcatggtgg

SEQ ID NO: 57112 - DNA, 20 bp, synthetic construct
  misc_feature 1..20: note = chemically synthesized
  source 1..20: mol_type = other DNA
aattagctgggcatggtggc

SEQ ID NO: 57113 - DNA, 20 bp, synthetic construct
  misc_feature 1..20: note = chemically synthesized
  source 1..20: mol_type = other DNA
gtggcgggcacctgtaatcc

SEQ ID NO: 57114 - DNA, 20 bp, synthetic construct
  misc_feature 1..20: note = chemically synthesized
  source 1..20: mol_type = other DNA
cacctgtaatcccagctact

SEQ ID NO: 57115 - DNA, 20 bp, synthetic construct
  misc_feature 1..20: note = chemically synthesized
  source 1..20: mol_type = other DNA
acctgtaatcccagctactt

SEQ ID NO: 57116 - DNA, 20 bp, synthetic construct
  misc_feature 1..20: note = chemically synthesized
  source 1..20: mol_type = other DNA
ctgtaatcccagctacttgg

SEQ ID NO: 57117 - DNA, 20 bp, synthetic construct
  misc_feature 1..20: note = chemically synthesized
  source 1..20: mol_type = other DNA
tgtaatcccagctacttggg

SEQ ID NO: 57118 - DNA, 20 bp, synthetic construct
  misc_feature 1..20: note = chemically synthesized
  source 1..20: mol_type = other DNA
tcccagctacttgggaggct

SEQ ID NO: 57119 - DNA, 20 bp, synthetic construct
  misc_feature 1..20: note = chemically synthesized
  source 1..20: mol_type = other DNA
cccagctacttgggaggctg

SEQ ID NO: 57120 - DNA, 20 bp, synthetic construct
  misc_feature 1..20: note = chemically synthesized
  source 1..20: mol_type = other DNA
agctacttgggaggctgagg

SEQ ID NO: 57121 - DNA, 20 bp, synthetic construct
  misc_feature 1..20: note = chemically synthesized
  source 1..20: mol_type = other DNA
gctacttgggaggctgaggc

SEQ ID NO: 57122 - DNA, 20 bp, synthetic construct
  misc_feature 1..20: note = chemically synthesized
  source 1..20: mol_type = other DNA
tacttgggaggctgaggcag

SEQ ID NO: 57123 - DNA, 20 bp, synthetic construct
  misc_feature 1..20: note = chemically synthesized
  source 1..20: mol_type = other DNA
ggcaggagaatcacttgaac

SEQ ID NO: 57124 - DNA, 20 bp, synthetic construct
  misc_feature 1..20: note = chemically synthesized
  source 1..20: mol_type = other DNA
caggagaatcacttgaaccg

SEQ ID NO: 57125 - DNA, 20 bp, synthetic construct
  misc_feature 1..20: note = chemically synthesized
  source 1..20: mol_type = other DNA
ggagaatcacttgaaccgga

SEQ ID NO: 57126 - DNA, 20 bp, synthetic construct
  misc_feature 1..20: note = chemically synthesized
  source 1..20: mol_type = other DNA
gagaatcacttgaaccggag

SEQ ID NO: 57127 - DNA, 20 bp, synthetic construct
  misc_feature 1..20: note = chemically synthesized
  source 1..20: mol_type = other DNA
aatcacttgaaccggagagg

SEQ ID NO: 57128 - DNA, 20 bp, synthetic construct
  misc_feature 1..20: note = chemically synthesized
  source 1..20: mol_type = other DNA
tcacttgaaccggagaggca

SEQ ID NO: 57129 - DNA, 20 bp, synthetic construct
  misc_feature 1..20: note = chemically synthesized
  source 1..20: mol_type = other DNA
cacttgaaccggagaggcag

SEQ ID NO: 57130 - DNA, 20 bp, synthetic construct
  misc_feature 1..20: note = chemically synthesized
  source 1..20: mol_type = other DNA
aaccggagaggcagaggttg

SEQ ID NO: 57131 - DNA, 20 bp, synthetic construct
  misc_feature 1..20: note = chemically synthesized
  source 1..20: mol_type = other DNA
ggagaggcagaggttgcagt

SEQ ID NO: 57132 - DNA, 20 bp, synthetic construct
  misc_feature 1..20: note = chemically synthesized
  source 1..20: mol_type = other DNA
ggcagaggttgcagtgagct

SEQ ID NO: 57133 - DNA, 20 bp, synthetic construct
  misc_feature 1..20: note = chemically synthesized
  source 1..20: mol_type = other DNA
gagattgcaccattgcactc

SEQ ID NO: 57134 - DNA, 20 bp, synthetic construct
  misc_feature 1..20: note = chemically synthesized
  source 1..20: mol_type = other DNA
ttgcaccattgcactccagc

SEQ ID NO: 57135 - DNA, 20 bp, synthetic construct
  misc_feature 1..20: note = chemically synthesized
  source 1..20: mol_type = other DNA
tgcaccattgcactccagcc

SEQ ID NO: 57136 - DNA, 20 bp, synthetic construct
  misc_feature 1..20: note = chemically synthesized
  source 1..20: mol_type = other DNA
attgcactccagccaggcaa

SEQ ID NO: 57137 - DNA, 20 bp, synthetic construct
  misc_feature 1..20: note = chemically synthesized
  source 1..20: mol_type = other DNA
ctccagccaggcaacagtgc

SEQ ID NO: 57138 - DNA, 20 bp, synthetic construct
  misc_feature 1..20: note = chemically synthesized
  source 1..20: mol_type = other DNA
catctcaaacaaacaaacaa

SEQ ID NO: 57139 - DNA, 20 bp, synthetic construct
  misc_feature 1..20: note = chemically synthesized
  source 1..20: mol_type = other DNA
tcaaacaaacaaacaaaaga

SEQ ID NO: 57140 - DNA, 20 bp, synthetic construct
  misc_feature 1..20: note = chemically synthesized
  source 1..20: mol_type = other DNA
acaaacaaacaaaagaaaga

SEQ ID NO: 57141 - DNA, 20 bp, synthetic construct
  misc_feature 1..20: note = chemically synthesized
  source 1..20: mol_type = other DNA
acaaacaaaagaaagaaaga

SEQ ID NO: 57142 - DNA, 20 bp, synthetic construct
  misc_feature 1..20: note = chemically synthesized
  source 1..20: mol_type = other DNA
acaaaagaaagaaagaaaga

SEQ ID NO: 57143 - DNA, 20 bp, synthetic construct
  misc_feature 1..20: note = chemically synthesized
  source 1..20: mol_type = other DNA
aaagaaagaaagaaagaaag

SEQ ID NO: 57144 - DNA, 20 bp, synthetic construct
  misc_feature 1..20: note = chemically synthesized
  source 1..20: mol_type = other DNA
aaagaaagaaagaaagtggc

SEQ ID NO: 57145 - DNA, 20 bp, synthetic construct
  misc_feature 1..20: note = chemically synthesized
  source 1..20: mol_type = other DNA
aagaaagaaagtggccagaa

SEQ ID NO: 57146 - DNA, 20 bp, synthetic construct
  misc_feature 1..20: note = chemically synthesized
  source 1..20: mol_type = other DNA
agaaagaaagtggccagaat

SEQ ID NO: 57147 - DNA, 20 bp, synthetic construct
  misc_feature 1..20: note = chemically synthesized
  source 1..20: mol_type = other DNA
gaatgggaatgtttacgtga

SEQ ID NO: 57148 - DNA, 20 bp, synthetic construct
  misc_feature 1..20: note = chemically synthesized
  source 1..20: mol_type = other DNA
aatgtttacgtgatagaaat

SEQ ID NO: 57149 - DNA, 20 bp, synthetic construct
  misc_feature 1..20: note = chemically synthesized
  source 1..20: mol_type = other DNA
aaattggcaaatgctaaact

SEQ ID NO: 57150 - DNA, 20 bp, synthetic construct
  misc_feature 1..20: note = chemically synthesized
  source 1..20: mol_type = other DNA
aattggcaaatgctaaactc

SEQ ID NO: 57151 - DNA, 20 bp, synthetic construct
  misc_feature 1..20: note = chemically synthesized
  source 1..20: mol_type = other DNA
attggcaaatgctaaactca

SEQ ID NO: 57152 - DNA, 20 bp, synthetic construct
  misc_feature 1..20: note = chemically synthesized
  source 1..20: mol_type = other DNA
cagggctttcccctgctccc

SEQ ID NO: 57153 - DNA, 20 bp, synthetic construct
  misc_feature 1..20: note = chemically synthesized
  source 1..20: mol_type = other DNA
gggctttcccctgctcccca

SEQ ID NO: 57154 - DNA, 20 bp, synthetic construct
  misc_feature 1..20: note = chemically synthesized
  source 1..20: mol_type = other DNA
gctttcccctgctccccaga

SEQ ID NO: 57155 - DNA, 20 bp, synthetic construct
  misc_feature 1..20: note = chemically synthesized
  source 1..20: mol_type = other DNA
tcccctgctccccagagagt

SEQ ID NO: 57156 - DNA, 20 bp, synthetic construct
  misc_feature 1..20: note = chemically synthesized
  source 1..20: mol_type = other DNA
tccccagagagtcagtttat

SEQ ID NO: 57157 - DNA, 20 bp, synthetic construct
  misc_feature 1..20: note = chemically synthesized
  source 1..20: mol_type = other DNA
gagagtcagtttatcagcac

SEQ ID NO: 57158 - DNA, 20 bp, synthetic construct
  misc_feature 1..20: note = chemically synthesized
  source 1..20: mol_type = other DNA
tatcagcactggacgtaaca

SEQ ID NO: 57159 - DNA, 20 bp, synthetic construct
  misc_feature 1..20: note = chemically synthesized
  source 1..20: mol_type = other DNA
ctggacgtaacatagttcat

SEQ ID NO: 57160 - DNA, 20 bp, synthetic construct
  misc_feature 1..20: note = chemically synthesized
  source 1..20: mol_type = other DNA
ggacgtaacatagttcataa

SEQ ID NO: 57161 - DNA, 20 bp, synthetic construct
  misc_feature 1..20: note = chemically synthesized
  source 1..20: mol_type = other DNA
agttcataagagcattgccg

SEQ ID NO: 57162 - DNA, 20 bp, synthetic construct
  misc_feature 1..20: note = chemically synthesized
  source 1..20: mol_type = other DNA
tcataagagcattgccgcgg

SEQ ID NO: 57163 - DNA, 20 bp, synthetic construct
  misc_feature 1..20: note = chemically synthesized
  source 1..20: mol_type = other DNA
aagagcattgccgcggaagc

SEQ ID NO: 57164 - DNA, 20 bp, synthetic construct
  misc_feature 1..20: note = chemically synthesized
  source 1..20: mol_type = other DNA
cggaagccagcctgcctacc

SEQ ID NO: 57165 - DNA, 20 bp, synthetic construct
  misc_feature 1..20: note = chemically synthesized
  source 1..20: mol_type = other DNA
ggaagccagcctgcctacct

SEQ ID NO: 57166 - DNA, 20 bp, synthetic construct
  misc_feature 1..20: note = chemically synthesized
  source 1..20: mol_type = other DNA
gcctacctgggcttccatcc

SEQ ID NO: 57167 - DNA, 20 bp, synthetic construct
  misc_feature 1..20: note = chemically synthesized
  source 1..20: mol_type = other DNA
cctgggcttccatcctggct

SEQ ID NO: 57168 - DNA, 20 bp, synthetic construct
  misc_feature 1..20: note = chemically synthesized
  source 1..20: mol_type = other DNA
tcggcatgtactaaccttgt

SEQ ID NO: 57169 - DNA, 20 bp, synthetic construct
  misc_feature 1..20: note = chemically synthesized
  source 1..20: mol_type = other DNA
gttggcctaatcatttaact

SEQ ID NO: 57170 - DNA, 20 bp, synthetic construct
  misc_feature 1..20: note = chemically synthesized
  source 1..20: mol_type = other DNA
aatcatttaactcagcacct

SEQ ID NO: 57171 - DNA, 20 bp, synthetic construct
  misc_feature 1..20: note = chemically synthesized
  source 1..20: mol_type = other DNA
gcatctactgtttctgtaaa

SEQ ID NO: 57172 - DNA, 20 bp, synthetic construct
  misc_feature 1..20: note = chemically synthesized
  source 1..20: mol_type = other DNA
tctactgtttctgtaaatag

SEQ ID NO: 57173 - DNA, 20 bp, synthetic construct
  misc_feature 1..20: note = chemically synthesized
  source 1..20: mol_type = other DNA
aaatagcagtaactacctca

SEQ ID NO: 57174 - DNA, 20 bp, synthetic construct
  misc_feature 1..20: note = chemically synthesized
  source 1..20: mol_type = other DNA
gcagtaactacctcacagaa

SEQ ID NO: 57175 - DNA, 20 bp, synthetic construct
  misc_feature 1..20: note = chemically synthesized
  source 1..20: mol_type = other DNA
ctacctcacagaaaagcaca

SEQ ID NO: 57176 - DNA, 20 bp, synthetic construct
  misc_feature 1..20: note = chemically synthesized
  source 1..20: mol_type = other DNA
acagaaaagcacatagcaca

SEQ ID NO: 57177 - DNA, 20 bp, synthetic construct
  misc_feature 1..20: note = chemically synthesized
  source 1..20: mol_type = other DNA
aaagcacatagcacatggac

SEQ ID NO: 57178 - DNA, 20 bp, synthetic construct
  misc_feature 1..20: note = chemically synthesized
  source 1..20: mol_type = other DNA
tgttaaccctgattattatt

SEQ ID NO: 57179 - DNA, 20 bp, synthetic construct
  misc_feature 1..20: note = chemically synthesized
  source 1..20: mol_type = other DNA
cctgattattattaagctgc

SEQ ID NO: 57180 - DNA, 20 bp, synthetic construct
  misc_feature 1..20: note = chemically synthesized
  source 1..20: mol_type = other DNA
tgattattattaagctgcca

SEQ ID NO: 57181 - DNA, 20 bp, synthetic construct
  misc_feature 1..20: note = chemically synthesized
  source 1..20: mol_type = other DNA
tgccagagataacctatttg

SEQ ID NO: 57182 - DNA, 20 bp, synthetic construct
  misc_feature 1..20: note = chemically synthesized
  source 1..20: mol_type = other DNA
cctatttgtagattataaaa

SEQ ID NO: 57183 - DNA, 20 bp, synthetic construct
  misc_feature 1..20: note = chemically synthesized
  source 1..20: mol_type = other DNA
tagattataaaacagaaact

SEQ ID NO: 57184 - DNA, 20 bp, synthetic construct
  misc_feature 1..20: note = chemically synthesized
  source 1..20: mol_type = other DNA
gataattgatatgacttgcc

SEQ ID NO: 57185 - DNA, 20 bp, synthetic construct
  misc_feature 1..20: note = chemically synthesized
  source 1..20: mol_type = other DNA
ataattgatatgacttgcca

SEQ ID NO: 57186 - DNA, 20 bp, synthetic construct
  misc_feature 1..20: note = chemically synthesized
  source 1..20: mol_type = other DNA
tatgacttgccaaggacatg

SEQ ID NO: 57187 - DNA, 20 bp, synthetic construct
  misc_feature 1..20: note = chemically synthesized
  source 1..20: mol_type = other DNA
acttgccaaggacatgtagt

SEQ ID NO: 57188 - DNA, 20 bp, synthetic construct
  misc_feature 1..20: note = chemically synthesized
  source 1..20: mol_type = other DNA
tgccaaggacatgtagttgg

SEQ ID NO: 57189 - DNA, 20 bp, synthetic construct
  misc_feature 1..20: note = chemically synthesized
  source 1..20: mol_type = other DNA
gccaaggacatgtagttggt

SEQ ID NO: 57190 - DNA, 20 bp, synthetic construct
  misc_feature 1..20: note = chemically synthesized
  source 1..20: mol_type = other DNA
aaggacatgtagttggtggg

SEQ ID NO: 57191 - DNA, 20 bp, synthetic construct
  misc_feature 1..20: note = chemically synthesized
  source 1..20: mol_type = other DNA
gacatgtagttggtgggtgg

SEQ ID NO: 57192 - DNA, 20 bp, synthetic construct
  misc_feature 1..20: note = chemically synthesized
  source 1..20: mol_type = other DNA
tagttggtgggtggcagaac

SEQ ID NO: 57193 - DNA, 20 bp, synthetic construct
  misc_feature 1..20: note = chemically synthesized
  source 1..20: mol_type = other DNA
agttggtgggtggcagaacg

SEQ ID NO: 57194 - DNA, 20 bp, synthetic construct
  misc_feature 1..20: note = chemically synthesized
  source 1..20: mol_type = other DNA
gttggtgggtggcagaacga

SEQ ID NO: 57195 - DNA, 20 bp, synthetic construct
  misc_feature 1..20: note = chemically synthesized
  source 1..20: mol_type = other DNA
gtgggtggcagaacgagggc

SEQ ID NO: 57196 - DNA, 20 bp, synthetic construct
  misc_feature 1..20: note = chemically synthesized
  source 1..20: mol_type = other DNA
gggtggcagaacgagggctg

SEQ ID NO: 57197 - DNA, 20 bp, synthetic construct
  misc_feature 1..20: note = chemically synthesized
  source 1..20: mol_type = other DNA
gcagaacgagggctggagcc

SEQ ID NO: 57198 - DNA, 20 bp, synthetic construct
  misc_feature 1..20: note = chemically synthesized
  source 1..20: mol_type = other DNA
gagggctggagcccagttcc

SEQ ID NO: 57199 - DNA, 20 bp, synthetic construct
  misc_feature 1..20: note = chemically synthesized
  source 1..20: mol_type = other DNA
agggctggagcccagttccc

SEQ ID NO: 57200 - DNA, 20 bp, synthetic construct
  misc_feature 1..20: note = chemically synthesized
  source 1..20: mol_type = other DNA
gggctggagcccagttccca

SEQ ID NO: 57201 - DNA, 20 bp, synthetic construct
  misc_feature 1..20: note = chemically synthesized
  source 1..20: mol_type = other DNA
cttttcattaccccacaaaa

SEQ ID NO: 57202 - DNA, 20 bp, synthetic construct
  misc_feature 1..20: note = chemically synthesized
  source 1..20: mol_type = other DNA
ttttcattaccccacaaaac

SEQ ID NO: 57203 - DNA, 20 bp, synthetic construct
  misc_feature 1..20: note = chemically synthesized
  source 1..20: mol_type = other DNA
gtgtgtttccttttttcata

SEQ ID NO: 57204 - DNA, 20 bp, synthetic construct
  misc_feature 1..20: note = chemically synthesized
  source 1..20: mol_type = other DNA
tctatctttttttttttttt

SEQ ID NO: 57205 - DNA, 20 bp, synthetic construct
  misc_feature 1..20: note = chemically synthesized
  source 1..20: mol_type = other DNA
tcttttttttttttttgaga

SEQ ID NO: 57206 - DNA, 20 bp, synthetic construct
  misc_feature 1..20: note = chemically synthesized
  source 1..20: mol_type = other DNA
cttttttttttttttgagac

SEQ ID NO: 57207 - DNA, 20 bp, synthetic construct
  misc_feature 1..20: note = chemically synthesized
  source 1..20: mol_type = other DNA
ttttttttttttttgagaca

SEQ ID NO: 57208 - DNA, 20 bp, synthetic construct
  misc_feature 1..20: note = chemically synthesized
  source 1..20: mol_type = other DNA
cagggtcttactctgttgcc

SEQ ID NO: 57209 - DNA, 20 bp, synthetic construct
  misc_feature 1..20: note = chemically synthesized
  source 1..20: mol_type = other DNA
agggtcttactctgttgccc

SEQ ID NO: 57210 - DNA, 20 bp, synthetic construct
  misc_feature 1..20: note = chemically synthesized
  source 1..20: mol_type = other DNA
tcttactctgttgcccaggc

SEQ ID NO: 57211 - DNA, 20 bp, synthetic construct
  misc_feature 1..20: note = chemically synthesized
  source 1..20: mol_type = other DNA
ttactctgttgcccaggctg

SEQ ID NO: 57212 - DNA, 20 bp, synthetic construct
  misc_feature 1..20: note = chemically synthesized
  source 1..20: mol_type = other DNA
ctgttgcccaggctggagtg

SEQ ID NO: 57213 - DNA, 20 bp, synthetic construct
  misc_feature 1..20: note = chemically synthesized
  source 1..20: mol_type = other DNA
ttgcccaggctggagtgcag

SEQ ID NO: 57214 - DNA, 20 bp, synthetic construct
  misc_feature 1..20: note = chemically synthesized
  source 1..20: mol_type = other DNA
acctcctccgcctctcacct

SEQ ID NO: 57215 - DNA, 20 bp, synthetic construct
  misc_feature 1..20: note = chemically synthesized
  source 1..20: mol_type = other DNA
gcctctcacctcagcctcct

SEQ ID NO: 57216 - DNA, 20 bp, synthetic construct
  misc_feature 1..20: note = chemically synthesized
  source 1..20: mol_type = other DNA
tctcacctcagcctcctgag

SEQ ID NO: 57217 - DNA, 20 bp, synthetic construct
  misc_feature 1..20: note = chemically synthesized
  source 1..20: mol_type = other DNA
acctcagcctcctgagtagc

SEQ ID NO: 57218 - DNA, 20 bp, synthetic construct
  misc_feature 1..20: note = chemically synthesized
  source 1..20: mol_type = other DNA
cctcagcctcctgagtagct

SEQ ID NO: 57219 - DNA, 20 bp, synthetic construct
  misc_feature 1..20: note = chemically synthesized
  source 1..20: mol_type = other DNA
ctcctgagtagctgggacta

SEQ ID NO: 57220 - DNA, 20 bp, synthetic construct
  misc_feature 1..20: note = chemically synthesized
  source 1..20: mol_type = other DNA
gactacagcaccaacacgcc

SEQ ID NO: 57221 - DNA, 20 bp, synthetic construct
  misc_feature 1..20: note = chemically synthesized
  source 1..20: mol_type = other DNA
taattttcgtaatgtttttg

SEQ ID NO: 57222 - DNA, 20 bp, synthetic construct
  misc_feature 1..20: note = chemically synthesized
  source 1..20: mol_type = other DNA
attttcgtaatgtttttgta

SEQ ID NO: 57223 - DNA, 20 bp, synthetic construct
  misc_feature 1..20: note = chemically synthesized
  source 1..20: mol_type = other DNA
tcgtaatgtttttgtagaga

SEQ ID NO: 57224 - DNA, 20 bp, synthetic construct
  misc_feature 1..20: note = chemically synthesized
  source 1..20: mol_type = other DNA
gtaatgtttttgtagagatg

SEQ ID NO: 57225 - DNA, 20 bp, synthetic construct
  misc_feature 1..20: note = chemically synthesized
  source 1..20: mol_type = other DNA
tggagtttcgccatgttgcc

SEQ ID NO: 57226 - DNA, 20 bp, synthetic construct
  misc_feature 1..20: note = chemically synthesized
  source 1..20: mol_type = other DNA
ggagtttcgccatgttgccc

SEQ ID NO: 57227 - DNA, 20 bp, synthetic construct
  misc_feature 1..20: note = chemically synthesized
  source 1..20: mol_type = other DNA
tttcgccatgttgcccaggc

SEQ ID NO: 57228 - DNA, 20 bp, synthetic construct
  misc_feature 1..20: note = chemically synthesized
  source 1..20: mol_type = other DNA
caggctggtcttgaactcct

SEQ ID NO: 57229 - DNA, 20 bp, synthetic construct
  misc_feature 1..20: note = chemically synthesized
  source 1..20: mol_type = other DNA
cttgaactcctgagttcacc

SEQ ID NO: 57230 - DNA, 20 bp, synthetic construct
  misc_feature 1..20: note = chemically synthesized
  source 1..20: mol_type = other DNA
ttgaactcctgagttcaccc

SEQ ID NO: 57231 - DNA, 20 bp, synthetic construct
  misc_feature 1..20: note = chemically synthesized
  source 1..20: mol_type = other DNA
gaactcctgagttcacccag

SEQ ID NO: 57232 - DNA, 20 bp, synthetic construct
  misc_feature 1..20: note = chemically synthesized
  source 1..20: mol_type = other DNA
caggagtgattcgcccacct

SEQ ID NO: 57233 - DNA, 20 bp, synthetic construct
  misc_feature 1..20: note = chemically synthesized
  source 1..20: mol_type = other DNA
tcgcccacctcggcctccca

SEQ ID NO: 57234 - DNA, 20 bp, synthetic construct
  misc_feature 1..20: note = chemically synthesized
  source 1..20: mol_type = other DNA
acctcggcctcccaaagtgc

SEQ ID NO: 57235 - DNA, 20 bp, synthetic construct
  misc_feature 1..20: note = chemically synthesized
  source 1..20: mol_type = other DNA
cctcggcctcccaaagtgct

SEQ ID NO: 57236 - DNA, 20 bp, synthetic construct
  misc_feature 1..20: note = chemically synthesized
  source 1..20: mol_type = other DNA
ctcccaaagtgctgggatta

SEQ ID NO: 57237 - DNA, 20 bp, synthetic construct
  misc_feature 1..20: note = chemically synthesized
  source 1..20: mol_type = other DNA
tcccaaagtgctgggattac

SEQ ID NO: 57238 - DNA, 20 bp, synthetic construct
  misc_feature 1..20: note = chemically synthesized
  source 1..20: mol_type = other DNA
agtgctgggattacaggtgt

SEQ ID NO: 57239 - DNA, 20 bp, synthetic construct
  misc_feature 1..20: note = chemically synthesized
  source 1..20: mol_type = other DNA
caggtgtgagccaccatgcc

SEQ ID NO: 57240 - DNA, 20 bp, synthetic construct
  misc_feature 1..20: note = chemically synthesized
  source 1..20: mol_type = other DNA
ctaataaaactctttgctca

SEQ ID NO: 57241 - DNA, 20 bp, synthetic construct
  misc_feature 1..20: note = chemically synthesized
  source 1..20: mol_type = other DNA
tgctcaaagcctatataact

SEQ ID NO: 57242 - DNA, 20 bp, synthetic construct
  misc_feature 1..20: note = chemically synthesized
  source 1..20: mol_type = other DNA
accctttaacccatatgaaa

SEQ ID NO: 57243 - DNA, 20 bp, synthetic construct
  misc_feature 1..20: note = chemically synthesized
  source 1..20: mol_type = other DNA
ccctttaacccatatgaaat

SEQ ID NO: 57244 - DNA, 20 bp, synthetic construct
  misc_feature 1..20: note = chemically synthesized
  source 1..20: mol_type = other DNA
ttcctgtattttcaactcac

SEQ ID NO: 57245 - DNA, 20 bp, synthetic construct
  misc_feature 1..20: note = chemically synthesized
  source 1..20: mol_type = other DNA
ctgtattttcaactcactgg

SEQ ID NO: 57246 - DNA, 20 bp, synthetic construct
  misc_feature 1..20: note = chemically synthesized
  source 1..20: mol_type = other DNA
tgtattttcaactcactggt

SEQ ID NO: 57247 - DNA, 20 bp, synthetic construct
  misc_feature 1..20: note = chemically synthesized
  source 1..20: mol_type = other DNA
ttctgtcttccccctttatg

SEQ ID NO: 57248 - DNA, 20 bp, synthetic construct
  misc_feature 1..20: note = chemically synthesized
  source 1..20: mol_type = other DNA
ccctttatgtagatgatcca

SEQ ID NO: 57249 - DNA, 20 bp, synthetic construct
  misc_feature 1..20: note = chemically synthesized
  source 1..20: mol_type = other DNA
ttatgtagatgatccaaagt

SEQ ID NO: 57250 - DNA, 20 bp, synthetic construct
  misc_feature 1..20: note = chemically synthesized
  source 1..20: mol_type = other DNA
atgtagatgatccaaagtca

SEQ ID NO: 57251 - DNA, 20 bp, synthetic construct
  misc_feature 1..20: note = chemically synthesized
  source 1..20: mol_type = other DNA
gtagatgatccaaagtcaga

SEQ ID NO: 57252 - DNA, 20 bp, synthetic construct
  misc_feature 1..20: note = chemically synthesized
  source 1..20: mol_type = other DNA
agatgatccaaagtcagaga

SEQ ID NO: 57253 - DNA, 20 bp, synthetic construct
  misc_feature 1..20: note = chemically synthesized
  source 1..20: mol_type = other DNA
gatgatccaaagtcagagag

SEQ ID NO: 57254 - DNA, 20 bp, synthetic construct
  misc_feature 1..20: note = chemically synthesized
  source 1..20: mol_type = other DNA
atgatccaaagtcagagaga

SEQ ID NO: 57255 - DNA, 20 bp, synthetic construct
  misc_feature 1..20: note = chemically synthesized
  source 1..20: mol_type = other DNA
tgatccaaagtcagagagag

SEQ ID NO: 57256 - DNA, 20 bp, synthetic construct
  misc_feature 1..20: note = chemically synthesized
  source 1..20: mol_type = other DNA
ccaaagtcagagagaggggt

SEQ ID NO: 57257 - DNA, 20 bp, synthetic construct
  misc_feature 1..20: note = chemically synthesized
  source 1..20: mol_type = other DNA
aagtcagagagaggggttgg

SEQ ID NO: 57258 - DNA, 20 bp, synthetic construct
  misc_feature 1..20: note = chemically synthesized
  source 1..20: mol_type = other DNA
gagagaggggttggaagcat

SEQ ID NO: 57259 - DNA, 20 bp, synthetic construct
  misc_feature 1..20: note = chemically synthesized
  source 1..20: mol_type = other DNA
agaggggttggaagcatgag

SEQ ID NO: 57260 - DNA, 20 bp, synthetic construct
  misc_feature 1..20: note = chemically synthesized
  source 1..20: mol_type = other DNA
ttggaagcatgagtagcccg

SEQ ID NO: 57261 - DNA, 20 bp, synthetic construct
  misc_feature 1..20: note = chemically synthesized
  source 1..20: mol_type = other DNA
gtagcccgtggcttcctgaa

SEQ ID NO: 57262 - DNA, 20 bp, synthetic construct
  misc_feature 1..20: note = chemically synthesized
  source 1..20: mol_type = other DNA
ccgtggcttcctgaatagcc

SEQ ID NO: 57263 - DNA, 20 bp, synthetic construct
  misc_feature 1..20: note = chemically synthesized
  source 1..20: mol_type = other DNA
cgtggcttcctgaatagcct

SEQ ID NO: 57264 - DNA, 20 bp, synthetic construct
  misc_feature 1..20: note = chemically synthesized
  source 1..20: mol_type = other DNA
gtggcttcctgaatagcctg

SEQ ID NO: 57265 - DNA, 20 bp, synthetic construct
  misc_feature 1..20: note = chemically synthesized
  source 1..20: mol_type = other DNA
cttcctgaatagcctgggga

SEQ ID NO: 57266 - DNA, 20 bp, synthetic construct
  misc_feature 1..20: note = chemically synthesized
  source 1..20: mol_type = other DNA
ctggggaaagcaacttctga

SEQ ID NO: 57267 - DNA, 20 bp, synthetic construct
  misc_feature 1..20: note = chemically synthesized
  source 1..20: mol_type = other DNA
ggaaagcaacttctgatgga

SEQ ID NO: 57268 - DNA, 20 bp, synthetic construct
  misc_feature 1..20: note = chemically synthesized
  source 1..20: mol_type = other DNA
ttctgatggacagacattgc

SEQ ID NO: 57269 - DNA, 20 bp, synthetic construct
  misc_feature 1..20: note = chemically synthesized
  source 1..20: mol_type = other DNA
ctgatggacagacattgcga

SEQ ID NO: 57270 - DNA, 20 bp, synthetic construct
  misc_feature 1..20: note = chemically synthesized
  source 1..20: mol_type = other DNA
gacattgcgagagcgaatgc

SEQ ID NO: 57271 - DNA, 20 bp, synthetic construct
  misc_feature 1..20: note = chemically synthesized
  source 1..20: mol_type = other DNA
ttgctgatctcctctctata

SEQ ID NO: 57272 - DNA, 20 bp, synthetic construct
  misc_feature 1..20: note = chemically synthesized
  source 1..20: mol_type = other DNA
tatatggttcttaccactta

SEQ ID NO: 57273 - DNA, 20 bp, synthetic construct
  misc_feature 1..20: note = chemically synthesized
  source 1..20: mol_type = other DNA
ggttcttaccacttaaagac

SEQ ID NO: 57274 - DNA, 20 bp, synthetic construct
  misc_feature 1..20: note = chemically synthesized
  source 1..20: mol_type = other DNA
gttcttaccacttaaagacg

SEQ ID NO: 57275 - DNA, 20 bp, synthetic construct
  misc_feature 1..20: note = chemically synthesized
  source 1..20: mol_type = other DNA
taccacttaaagacgaggtt

SEQ ID NO: 57276 - DNA, 20 bp, synthetic construct
  misc_feature 1..20: note = chemically synthesized
  source 1..20: mol_type = other DNA
acttaaagacgaggttgagc

SEQ ID NO: 57277 - DNA, 20 bp, synthetic construct
  misc_feature 1..20: note = chemically synthesized
  source 1..20: mol_type = other DNA
gttgagccagtctccaatca

SEQ ID NO: 57278 - DNA, 20 bp, synthetic construct
  misc_feature 1..20: note = chemically synthesized
  source 1..20: mol_type = other DNA
tctccaatcacagctaccca

SEQ ID NO: 57279 - DNA, 20 bp, synthetic construct
  misc_feature 1..20: note = chemically synthesized
  source 1..20: mol_type = other DNA
ctccaatcacagctacccaa

SEQ ID NO: 57280 - DNA, 20 bp, synthetic construct
  misc_feature 1..20: note = chemically synthesized
  source 1..20: mol_type = other DNA
ccaatcacagctacccaaag

SEQ ID NO: 57281 - DNA, 20 bp, synthetic construct
  misc_feature 1..20: note = chemically synthesized
  source 1..20: mol_type = other DNA
ccaaaggagtttaatgccca

SEQ ID NO: 57282 - DNA, 20 bp, synthetic construct
  misc_feature 1..20: note = chemically synthesized
  source 1..20: mol_type = other DNA
ttaatgcccacagcttcctg

SEQ ID NO: 57283 - DNA, 20 bp, synthetic construct
  misc_feature 1..20: note = chemically synthesized
  source 1..20: mol_type = other DNA
tgcccacagcttcctgaaga

SEQ ID NO: 57284 - DNA, 20 bp, synthetic construct
  misc_feature 1..20: note = chemically synthesized
  source 1..20: mol_type = other DNA
cagcttcctgaagatggaac

SEQ ID NO: 57285 - DNA, 20 bp, synthetic construct
  misc_feature 1..20: note = chemically synthesized
  source 1..20: mol_type = other DNA
ttcctgaagatggaaccaga

SEQ ID NO: 57286 - DNA, 20 bp, synthetic construct
  misc_feature 1..20: note = chemically synthesized
  source 1..20: mol_type = other DNA
tcctgaagatggaaccagat

SEQ ID NO: 57287 - DNA, 20 bp, synthetic construct
  misc_feature 1..20: note = chemically synthesized
  source 1..20: mol_type = other DNA
cctgaagatggaaccagatg

SEQ ID NO: 57288 - DNA, 20 bp, synthetic construct
  misc_feature 1..20: note = chemically synthesized
  source 1..20: mol_type = other DNA
gaagatggaaccagatgggg

SEQ ID NO: 57289 - DNA, 20 bp, synthetic construct
  misc_feature 1..20: note = chemically synthesized
  source 1..20: mol_type = other DNA
agatggaaccagatggggaa

SEQ ID NO: 57290 - DNA, 20 bp, synthetic construct
  misc_feature 1..20: note = chemically synthesized
  source 1..20: mol_type = other DNA
gatggaaccagatggggaag

SEQ ID NO: 57291 - DNA, 20 bp, synthetic construct
  misc_feature 1..20: note = chemically synthesized
  source 1..20: mol_type = other DNA
accagatggggaagaggacg

SEQ ID NO: 57292 - DNA, 20 bp, synthetic construct
  misc_feature 1..20: note = chemically synthesized
  source 1..20: mol_type = other DNA
agatggggaagaggacgtag

SEQ ID NO: 57293 - DNA, 20 bp, synthetic construct
  misc_feature 1..20: note = chemically synthesized
  source 1..20: mol_type = other DNA
gatggggaagaggacgtaga

SEQ ID NO: 57294 - DNA, 20 bp, synthetic construct
  misc_feature 1..20: note = chemically synthesized
  source 1..20: mol_type = other DNA
aggacgtagaaggcattcct

SEQ ID NO: 57295 - DNA, 20 bp, synthetic construct
  misc_feature 1..20: note = chemically synthesized
  source 1..20: mol_type = other DNA
ggacgtagaaggcattcctg

SEQ ID NO: 57296 - DNA, 20 bp, synthetic construct
  misc_feature 1..20: note = chemically synthesized
  source 1..20: mol_type = other DNA
attcctgaggtctgcgatca

SEQ ID NO: 57297 - DNA, 20 bp, synthetic construct
  misc_feature 1..20: note = chemically synthesized
  source 1..20: mol_type = other DNA
ggtctgcgatcacggacacc

SEQ ID NO: 57298 - DNA, 20 bp, synthetic construct
  misc_feature 1..20: note = chemically synthesized
  source 1..20: mol_type = other DNA
tcacggacaccaagatgaac

SEQ ID NO: 57299 - DNA, 20 bp, synthetic construct
  misc_feature 1..20: note = chemically synthesized
  source 1..20: mol_type = other DNA
acaccaagatgaaccagtcc

SEQ ID NO: 57300 - DNA, 20 bp, synthetic construct
  misc_feature 1..20: note = chemically synthesized
  source 1..20: mol_type = other DNA
caccaagatgaaccagtcct

SEQ ID NO: 57301 - DNA, 20 bp, synthetic construct
  misc_feature 1..20: note = chemically synthesized
  source 1..20: mol_type = other DNA
ccaagatgaaccagtcctgg

SEQ ID NO: 57302 - DNA, 20 bp, synthetic construct
  misc_feature 1..20: note = chemically synthesized
  source 1..20: mol_type = other DNA
tgaaccagtcctgggagtct

SEQ ID NO: 57303 - DNA, 20 bp, synthetic construct
  misc_feature 1..20: note = chemically synthesized
  source 1..20: mol_type = other DNA
gggagtcttggtaattcacc

SEQ ID NO: 57304 - DNA, 20 bp, synthetic construct
  misc_feature 1..20: note = chemically synthesized
  source 1..20: mol_type = other DNA
gagtcttggtaattcacctg

SEQ ID NO: 57305 - DNA, 20 bp, synthetic construct
  misc_feature 1..20: note = chemically synthesized
  source 1..20: mol_type = other DNA
agtcttggtaattcacctgg

SEQ ID NO: 57306 - DNA, 20 bp, synthetic construct
  misc_feature 1..20: note = chemically synthesized
  source 1..20: mol_type = other DNA
cctggaggtaatgtgttgac

SEQ ID NO: 57307 - DNA, 20 bp, synthetic construct
  misc_feature 1..20: note = chemically synthesized
  source 1..20: mol_type = other DNA
aatgtgttgactggatccca

SEQ ID NO: 57308 - DNA, 20 bp, synthetic construct
  misc_feature 1..20: note = chemically synthesized
  source 1..20: mol_type = other DNA
ttgactggatcccaaagtca

SEQ ID NO: 57309 - DNA, 20 bp, synthetic construct
  misc_feature 1..20: note = chemically synthesized
  source 1..20: mol_type = other DNA
gactggatcccaaagtcatg

SEQ ID NO: 57310 - DNA, 20 bp, synthetic construct
  misc_feature 1..20: note = chemically synthesized
  source 1..20: mol_type = other DNA
ttcctccatcctcatttcct

SEQ ID NO: 57311 - DNA, 20 bp, synthetic construct
  misc_feature 1..20: note = chemically synthesized
  source 1..20: mol_type = other DNA
tcctcatttccttggcacct

SEQ ID NO: 57312 - DNA, 20 bp, synthetic construct
  misc_feature 1..20: note = chemically synthesized
  source 1..20: mol_type = other DNA
cctcatttccttggcacctc

SEQ ID NO: 57313 - DNA, 20 bp, synthetic construct
  misc_feature 1..20: note = chemically synthesized
  source 1..20: mol_type = other DNA
catttccttggcacctcagg

SEQ ID NO: 57314 - DNA, 20 bp, synthetic construct
  misc_feature 1..20: note = chemically synthesized
  source 1..20: mol_type = other DNA
ttggcacctcaggaagatgt

SEQ ID NO: 57315 - DNA, 20 bp, synthetic construct
  misc_feature 1..20: note = chemically synthesized
  source 1..20: mol_type = other DNA
gcacctcaggaagatgtcag

SEQ ID NO: 57316 - DNA, 20 bp, synthetic construct
  misc_feature 1..20: note = chemically synthesized
  source 1..20: mol_type = other DNA
acctcaggaagatgtcagca

SEQ ID NO: 57317 - DNA, 20 bp, synthetic construct
  misc_feature 1..20: note = chemically synthesized
  source 1..20: mol_type = other DNA
agatgtcagcagagcccttg

SEQ ID NO: 57318 - DNA, 20 bp, synthetic construct
  misc_feature 1..20: note = chemically synthesized
  source 1..20: mol_type = other DNA
cagagcccttgcagttattc

SEQ ID NO: 57319 - DNA, 20 bp, synthetic construct
  misc_feature 1..20: note = chemically synthesized
  source 1..20: mol_type = other DNA
agagcccttgcagttattcc

SEQ ID NO: 57320 - DNA, 20 bp, synthetic construct
  misc_feature 1..20: note = chemically synthesized
  source 1..20: mol_type = other DNA
ccttgcagttattccaggct

SEQ ID NO: 57321 - DNA, 20 bp, synthetic construct
  misc_feature 1..20: note = chemically synthesized
  source 1..20: mol_type = other DNA
tgcagttattccaggcttgg

SEQ ID NO: 57322 - DNA, 20 bp, synthetic construct
  misc_feature 1..20: note = chemically synthesized
  source 1..20: mol_type = other DNA
ggtggtgattgctctgctat

SEQ ID NO: 57323 - DNA, 20 bp, synthetic construct
  misc_feature 1..20: note = chemically synthesized
  source 1..20: mol_type = other DNA
tgttttatatgccctgtatc

SEQ ID NO: 57324 - DNA, 20 bp, synthetic construct
  misc_feature 1..20: note = chemically synthesized
  source 1..20: mol_type = other DNA
tatgccctgtatccagtatt

SEQ ID NO: 57325 - DNA, 20 bp, synthetic construct
  misc_feature 1..20: note = chemically synthesized
  source 1..20: mol_type = other DNA
atgccctgtatccagtattc

SEQ ID NO: 57326 - DNA, 20 bp, synthetic construct
  misc_feature 1..20: note = chemically synthesized
  source 1..20: mol_type = other DNA
atccagtattcaggtcaacc

SEQ ID NO: 57327 - DNA, 20 bp, synthetic construct
  misc_feature 1..20: note = chemically synthesized
  source 1..20: mol_type = other DNA
gtcaacccagccctgatctt

SEQ ID NO: 57328 - DNA, 20 bp, synthetic construct
  misc_feature 1..20: note = chemically synthesized
  source 1..20: mol_type = other DNA
tgtctaaaatgtattgatca

SEQ ID NO: 57329 - DNA, 20 bp, synthetic construct
  misc_feature 1..20: note = chemically synthesized
  source 1..20: mol_type = other DNA
gtctaaaatgtattgatcaa

SEQ ID NO: 57330 - DNA, 20 bp, synthetic construct
  misc_feature 1..20: note = chemically synthesized
  source 1..20: mol_type = other DNA
attgatcaaaggtgcatcac

SEQ ID NO: 57331 - DNA, 20 bp, synthetic construct
  misc_feature 1..20: note = chemically synthesized
  source 1..20: mol_type = other DNA
gatcaaaggtgcatcaccag

SEQ ID NO: 57332 - DNA, 20 bp, synthetic construct
  misc_feature 1..20: note = chemically synthesized
  source 1..20: mol_type = other DNA
atcaaaggtgcatcaccagt

SEQ ID NO: 57333 - DNA, 20 bp, synthetic construct
  misc_feature 1..20: note = chemically synthesized
  source 1..20: mol_type = other DNA
taggttgatgcaaacatgtt

SEQ ID NO: 57334 - DNA, 20 bp, synthetic construct
  misc_feature 1..20: note = chemically synthesized
  source 1..20: mol_type = other DNA
aggttgatgcaaacatgttc

SEQ ID NO: 57335 - DNA, 20 bp, synthetic construct
  misc_feature 1..20: note = chemically synthesized
  source 1..20: mol_type = other DNA
ggttgatgcaaacatgttca

SEQ ID NO: 57336 - DNA, 20 bp, synthetic construct
  misc_feature 1..20: note = chemically synthesized
  source 1..20: mol_type = other DNA
tcagggtgatttacgtaaaa

SEQ ID NO: 57337 - DNA, 20 bp, synthetic construct
  misc_feature 1..20: note = chemically synthesized
  source 1..20: mol_type = other DNA
atttacgtaaaatagaaaaa

SEQ ID NO: 57338 - DNA, 20 bp, synthetic construct
  misc_feature 1..20: note = chemically synthesized
  source 1..20: mol_type = other DNA
tttacgtaaaatagaaaaac

SEQ ID NO: 57339 - DNA, 20 bp, synthetic construct
  misc_feature 1..20: note = chemically synthesized
  source 1..20: mol_type = other DNA
gaaaaacaggcacacaaaaa

SEQ ID NO: 57340 - DNA, 20 bp, synthetic construct
  misc_feature 1..20: note = chemically synthesized
  source 1..20: mol_type = other DNA
gcacacaaaaacagcctgat

SEQ ID NO: 57341 - DNA, 20 bp, synthetic construct
  misc_feature 1..20: note = chemically synthesized
  source 1..20: mol_type = other DNA
agcctgatcggccatgtact

SEQ ID NO: 57342 - DNA, 20 bp, synthetic construct
  misc_feature 1..20: note = chemically synthesized
  source 1..20: mol_type = other DNA
ctgatcggccatgtactcag

SEQ ID NO: 57343 - DNA, 20 bp, synthetic construct
  misc_feature 1..20: note = chemically synthesized
  source 1..20: mol_type = other DNA
tgatcggccatgtactcagc

SEQ ID NO: 57344 - DNA, 20 bp, synthetic construct
  misc_feature 1..20: note = chemically synthesized
  source 1..20: mol_type = other DNA
gatcggccatgtactcagca

SEQ ID NO: 57345 - DNA, 20 bp, synthetic construct
  misc_feature 1..20: note = chemically synthesized
  source 1..20: mol_type = other DNA
gcagggccaatgattaactt

SEQ ID NO: 57346 - DNA, 20 bp, synthetic construct
  misc_feature 1..20: note = chemically synthesized
  source 1..20: mol_type = other DNA
attaactttggcatgcttct

SEQ ID NO: 57347 - DNA, 20 bp, synthetic construct
  misc_feature 1..20: note = chemically synthesized
  source 1..20: mol_type = other DNA
aactttggcatgcttcttgg

SEQ ID NO: 57348 - DNA, 20 bp, synthetic construct
  misc_feature 1..20: note = chemically synthesized
  source 1..20: mol_type = other DNA
ggcatgcttcttggcagtgc

SEQ ID NO: 57349 - DNA, 20 bp, synthetic construct
  misc_feature 1..20: note = chemically synthesized
  source 1..20: mol_type = other DNA
gcatgcttcttggcagtgca

SEQ ID NO: 57350 - DNA, 20 bp, synthetic construct
  misc_feature 1..20: note = chemically synthesized
  source 1..20: mol_type = other DNA
catgcttcttggcagtgcaa

SEQ ID NO: 57351 - DNA, 20 bp, synthetic construct
  misc_feature 1..20: note = chemically synthesized
  source 1..20: mol_type = other DNA
agtgcaagggtctgccctcc

SEQ ID NO: 57352 - DNA, 20 bp, synthetic construct
  misc_feature 1..20: note = chemically synthesized
  source 1..20: mol_type = other DNA
gccctcctggtccccgaaac

SEQ ID NO: 57353 - DNA, 20 bp, synthetic construct
  misc_feature 1..20: note = chemically synthesized
  source 1..20: mol_type = other DNA
ccctcctggtccccgaaacc

SEQ ID NO: 57354 - DNA, 20 bp, synthetic construct
  misc_feature 1..20: note = chemically synthesized
  source 1..20: mol_type = other DNA
cctggtccccgaaaccaggc

SEQ ID NO: 57355 - DNA, 20 bp, synthetic construct
  misc_feature 1..20: note = chemically synthesized
  source 1..20: mol_type = other DNA
tggtccccgaaaccaggcca

SEQ ID NO: 57356 - DNA, 20 bp, synthetic construct
  misc_feature 1..20: note = chemically synthesized
  source 1..20: mol_type = other DNA
ccgaaaccaggccagagaca

SEQ ID NO: 57357 - DNA, 20 bp, synthetic construct
  misc_feature 1..20: note = chemically synthesized
  source 1..20: mol_type = other DNA
cgaaaccaggccagagacac

SEQ ID NO: 57358 - DNA, 20 bp, synthetic construct
  misc_feature 1..20: note = chemically synthesized
  source 1..20: mol_type = other DNA
accaggccagagacacagga

SEQ ID NO: 57359 - DNA, 20 bp, synthetic construct
  misc_feature 1..20: note = chemically synthesized
  source 1..20: mol_type = other DNA
caggccagagacacaggaca

SEQ ID NO: 57360 - DNA, 20 bp, synthetic construct
  misc_feature 1..20: note = chemically synthesized
  source 1..20: mol_type = other DNA
catccacgatgattcttgca

SEQ ID NO: 57361 - DNA, 20 bp, synthetic construct
  misc_feature 1..20: note = chemically synthesized
  source 1..20: mol_type = other DNA
gatgattcttgcaaagatgt

SEQ ID NO: 57362 - DNA, 20 bp, synthetic construct
  misc_feature 1..20: note = chemically synthesized
  source 1..20: mol_type = other DNA
tgcctgcaactgcacttatt

SEQ ID NO: 57363 - DNA, 20 bp, synthetic construct
  misc_feature 1..20: note = chemically synthesized
  source 1..20: mol_type = other DNA
gcctgcaactgcacttattt

SEQ ID NO: 57364 - DNA, 20 bp, synthetic construct
  misc_feature 1..20: note = chemically synthesized
  source 1..20: mol_type = other DNA
cctgcaactgcacttatttg

SEQ ID NO: 57365 - DNA, 20 bp, synthetic construct
  misc_feature 1..20: note = chemically synthesized
  source 1..20: mol_type = other DNA
actgcacttatttggggaca

SEQ ID NO: 57366 - DNA, 20 bp, synthetic construct
  misc_feature 1..20: note = chemically synthesized
  source 1..20: mol_type = other DNA
ttggggacaaagaaaaatct

SEQ ID NO: 57367 - DNA, 20 bp, synthetic construct
  misc_feature 1..20: note = chemically synthesized
  source 1..20: mol_type = other DNA
aaagaaaaatcttggtgctc

SEQ ID NO: 57368 - DNA, 20 bp, synthetic construct
  misc_feature 1..20: note = chemically synthesized
  source 1..20: mol_type = other DNA
tcttggtgctctagctattc

SEQ ID NO: 57369 - DNA, 20 bp, synthetic construct
  misc_feature 1..20: note = chemically synthesized
  source 1..20: mol_type = other DNA
gctctagctattcaagtttt

SEQ ID NO: 57370 - DNA, 20 bp, synthetic construct
  misc_feature 1..20: note = chemically synthesized
  source 1..20: mol_type = other DNA
taagttcttaattttaaaat

SEQ ID NO: 57371 - DNA, 20 bp, synthetic construct
  misc_feature 1..20: note = chemically synthesized
  source 1..20: mol_type = other DNA
tcttaattttaaaattagta

SEQ ID NO: 57372 - DNA, 20 bp, synthetic construct
  misc_feature 1..20: note = chemically synthesized
  source 1..20: mol_type = other DNA
ttttaaaattagtaaagttc

SEQ ID NO: 57373 - DNA, 20 bp, synthetic construct
  misc_feature 1..20: note = chemically synthesized
  source 1..20: mol_type = other DNA
aaaattagtaaagttctggc

SEQ ID NO: 57374 - DNA, 20 bp, synthetic construct
  misc_feature 1..20: note = chemically synthesized
  source 1..20: mol_type = other DNA
agtaaagttctggctggttg

SEQ ID NO: 57375 - DNA, 20 bp, synthetic construct
  misc_feature 1..20: note = chemically synthesized
  source 1..20: mol_type = other DNA
aaagttctggctggttgtgg

SEQ ID NO: 57376 - DNA, 20 bp, synthetic construct
  misc_feature 1..20: note = chemically synthesized
  source 1..20: mol_type = other DNA
gtggctcacacctgtaatcc

SEQ ID NO: 57377 - DNA, 20 bp, synthetic construct
  misc_feature 1..20: note = chemically synthesized
  source 1..20: mol_type = other DNA
cacctgtaatcccagcaatt

SEQ ID NO: 57378 - DNA, 20 bp, synthetic construct
  misc_feature 1..20: note = chemically synthesized
  source 1..20: mol_type = other DNA
acctgtaatcccagcaattt

SEQ ID NO: 57379 - DNA, 20 bp, synthetic construct
  misc_feature 1..20: note = chemically synthesized
  source 1..20: mol_type = other DNA
ctgtaatcccagcaatttgg

SEQ ID NO: 57380 - DNA, 20 bp, synthetic construct
  misc_feature 1..20: note = chemically synthesized
  source 1..20: mol_type = other DNA
tgtaatcccagcaatttggg

SEQ ID NO: 57381 - DNA, 20 bp, synthetic construct
  misc_feature 1..20: note = chemically synthesized
  source 1..20: mol_type = other DNA
tcccagcaatttgggaggct

SEQ ID NO: 57382 - DNA, 20 bp, synthetic construct
  misc_feature 1..20: note = chemically synthesized
  source 1..20: mol_type = other DNA
cccagcaatttgggaggctg

SEQ ID NO: 57383 - DNA, 20 bp, synthetic construct
  misc_feature 1..20: note = chemically synthesized
  source 1..20: mol_type = other DNA
agcaatttgggaggctgagg

SEQ ID NO: 57384 - DNA, 20 bp, synthetic construct
  misc_feature 1..20: note = chemically synthesized
  source 1..20: mol_type = other DNA
gcaatttgggaggctgaggt

SEQ ID NO: 57385 - DNA, 20 bp, synthetic construct
  misc_feature 1..20: note = chemically synthesized
  source 1..20: mol_type = other DNA
aatttgggaggctgaggtgg

SEQ ID NO: 57386 - DNA, 20 bp, synthetic construct
  misc_feature 1..20: note = chemically synthesized
  source 1..20: mol_type = other DNA
atttgggaggctgaggtggg

SEQ ID NO: 57387 - DNA, 20 bp, synthetic construct
  misc_feature 1..20: note = chemically synthesized
  source 1..20: mol_type = other DNA
tgaggtgggaggatcccttg

SEQ ID NO: 57388 - DNA, 20 bp, synthetic construct
  misc_feature 1..20: note = chemically synthesized
  source 1..20: mol_type = other DNA
gtgggaggatcccttgaagc

SEQ ID NO: 57389 - DNA, 20 bp, synthetic construct
  misc_feature 1..20: note = chemically synthesized
  source 1..20: mol_type = other DNA
tgggaggatcccttgaagcc

SEQ ID NO: 57390 - DNA, 20 bp, synthetic construct
  misc_feature 1..20: note = chemically synthesized
  source 1..20: mol_type = other DNA
ggaggatcccttgaagccag

SEQ ID NO: 57391 - DNA, 20 bp, synthetic construct
  misc_feature 1..20: note = chemically synthesized
  source 1..20: mol_type = other DNA
gatcccttgaagccaggagt

SEQ ID NO: 57392 - DNA, 20 bp, synthetic construct
  misc_feature 1..20: note = chemically synthesized
  source 1..20: mol_type = other DNA
tcccttgaagccaggagttg

SEQ ID NO: 57393 - DNA, 20 bp, synthetic construct
  misc_feature 1..20: note = chemically synthesized
  source 1..20: mol_type = other DNA
tgaagccaggagttggagac

SEQ ID NO: 57394 - DNA, 20 bp, synthetic construct
  misc_feature 1..20: note = chemically synthesized
  source 1..20: mol_type = other DNA
ccaggagttggagaccagcc

SEQ ID NO: 57395 - DNA, 20 bp, synthetic construct
  misc_feature 1..20: note = chemically synthesized
  source 1..20: mol_type = other DNA
caggagttggagaccagcct

SEQ ID NO: 57396 - DNA, 20 bp, synthetic construct
  misc_feature 1..20: note = chemically synthesized
  source 1..20: mol_type = other DNA
ggagaccagcctgggcaaca

SEQ ID NO: 57397 - DNA, 20 bp, synthetic construct
  misc_feature 1..20: note = chemically synthesized
  source 1..20: mol_type = other DNA
accagcctgggcaacaaagc

SEQ ID NO: 57398 - DNA, 20 bp, synthetic construct
  misc_feature 1..20: note = chemically synthesized
  source 1..20: mol_type = other DNA
aaaaatttaaaaaattgttt

SEQ ID NO: 57399 - DNA, 20 bp, synthetic construct
  misc_feature 1..20: note = chemically synthesized
  source 1..20: mol_type = other DNA
aattgttttggtgtgtgtga

SEQ ID NO: 57400 - DNA, 20 bp, synthetic construct
  misc_feature 1..20: note = chemically synthesized
  source 1..20: mol_type = other DNA
tgtgtgatggtgtacccttg

SEQ ID NO: 57401 - DNA, 20 bp, synthetic construct
  misc_feature 1..20: note = chemically synthesized
  source 1..20: mol_type = other DNA
atggtgtacccttgtagtcc

SEQ ID NO: 57402 - DNA, 20 bp, synthetic construct
  misc_feature 1..20: note = chemically synthesized
  source 1..20: mol_type = other DNA
cccttgtagtcccagctatt

SEQ ID NO: 57403 - DNA, 20 bp, synthetic construct
  misc_feature 1..20: note = chemically synthesized
  source 1..20: mol_type = other DNA
ccttgtagtcccagctattc

SEQ ID NO: 57404 - DNA, 20 bp, synthetic construct
  misc_feature 1..20: note = chemically synthesized
  source 1..20: mol_type = other DNA
ttgtagtcccagctattcag

SEQ ID NO: 57405 - DNA, 20 bp, synthetic construct
  misc_feature 1..20: note = chemically synthesized
  source 1..20: mol_type = other DNA
tgtagtcccagctattcagg

SEQ ID NO: 57406 - DNA, 20 bp, synthetic construct
  misc_feature 1..20: note = chemically synthesized
  source 1..20: mol_type = other DNA
tcccagctattcaggaggct

SEQ ID NO: 57407 - DNA, 20 bp, synthetic construct
  misc_feature 1..20: note = chemically synthesized
  source 1..20: mol_type = other DNA
cccagctattcaggaggctg

SEQ ID NO: 57408 - DNA, 20 bp, synthetic construct
  misc_feature 1..20: note = chemically synthesized
  source 1..20: mol_type = other DNA
agctattcaggaggctgagg

SEQ ID NO: 57409 - DNA, 20 bp, synthetic construct
  misc_feature 1..20: note = chemically synthesized
  source 1..20: mol_type = other DNA
gctattcaggaggctgaggc

SEQ ID NO: 57410 - DNA, 20 bp, synthetic construct
  misc_feature 1..20: note = chemically synthesized
  source 1..20: mol_type = other DNA
tattcaggaggctgaggcag

SEQ ID NO: 57411 - DNA, 20 bp, synthetic construct
  misc_feature 1..20: note = chemically synthesized
  source 1..20: mol_type = other DNA
attcaggaggctgaggcagg

SEQ ID NO: 57412 - DNA, 20 bp, synthetic construct
  misc_feature 1..20: note = chemically synthesized
  source 1..20: mol_type = other DNA
ctgaggcaggaggattgctt

SEQ ID NO: 57413 - DNA, 20 bp, synthetic construct
  misc_feature 1..20: note = chemically synthesized
  source 1..20: mol_type = other DNA
gcaggaggattgcttgagcc

SEQ ID NO: 57414 - DNA, 20 bp, synthetic construct
  misc_feature 1..20: note = chemically synthesized
  source 1..20: mol_type = other DNA
caggaggattgcttgagccc

SEQ ID NO: 57415 - DNA, 20 bp, synthetic construct
  misc_feature 1..20: note = chemically synthesized
  source 1..20: mol_type = other DNA
ggaggattgcttgagcccag

SEQ ID NO: 57416 - DNA, 20 bp, synthetic construct
  misc_feature 1..20: note = chemically synthesized
  source 1..20: mol_type = other DNA
gattgcttgagcccaggagt

SEQ ID NO: 57417 - DNA, 20 bp, synthetic construct
  misc_feature 1..20: note = chemically synthesized
  source 1..20: mol_type = other DNA
ttgcttgagcccaggagttg

SEQ ID NO: 57418 - DNA, 20 bp, synthetic construct
  misc_feature 1..20: note = chemically synthesized
  source 1..20: mol_type = other DNA
agcccaggagttggagtctg

SEQ ID NO: 57419 - DNA, 20 bp, synthetic construct
  misc_feature 1..20: note = chemically synthesized
  source 1..20: mol_type = other DNA
caggagttggagtctgcagt

SEQ ID NO: 57420 - DNA, 20 bp, synthetic construct
  misc_feature 1..20: note = chemically synthesized
  source 1..20: mol_type = other DNA
attgtcccaccgctgcacta

SEQ ID NO: 57421 - DNA, 20 bp, synthetic construct
  misc_feature 1..20: note = chemically synthesized
  source 1..20: mol_type = other DNA
cccaccgctgcactacagcc

SEQ ID NO: 57422 - DNA, 20 bp, synthetic construct
  misc_feature 1..20: note = chemically synthesized
  source 1..20: mol_type = other DNA
ccaccgctgcactacagcct

SEQ ID NO: 57423 - DNA, 20 bp, synthetic construct
  misc_feature 1..20: note = chemically synthesized
  source 1..20: mol_type = other DNA
gcactacagcctgggcaatc

SEQ ID NO: 57424 - DNA, 20 bp, synthetic construct
  misc_feature 1..20: note = chemically synthesized
  source 1..20: mol_type = other DNA
tacagcctgggcaatcgagc

SEQ ID NO: 57425 - DNA, 20 bp, synthetic construct
  misc_feature 1..20: note = chemically synthesized
  source 1..20: mol_type = other DNA
tgggcaatcgagcaagaccc

SEQ ID NO: 57426 - DNA, 20 bp, synthetic construct
  misc_feature 1..20: note = chemically synthesized
  source 1..20: mol_type = other DNA
aacaaaacaaaacaaaacaa

SEQ ID NO: 57427 - DNA, 20 bp, synthetic construct
  misc_feature 1..20: note = chemically synthesized
  source 1..20: mol_type = other DNA
gaaaaacaacaaataaaata

SEQ ID NO: 57428 - DNA, 20 bp, synthetic construct
  misc_feature 1..20: note = chemically synthesized
  source 1..20: mol_type = other DNA
tatagtaacttctattgtat

SEQ ID NO: 57429 - DNA, 20 bp, synthetic construct
  misc_feature 1..20: note = chemically synthesized
  source 1..20: mol_type = other DNA
atagtaacttctattgtatt

SEQ ID NO: 57430 - DNA, 20 bp, synthetic construct
  misc_feature 1..20: note = chemically synthesized
  source 1..20: mol_type = other DNA
tagtaacttctattgtattg

SEQ ID NO: 57431 - DNA, 20 bp, synthetic construct
  misc_feature 1..20: note = chemically synthesized
  source 1..20: mol_type = other DNA
attggggactatcatcttgc

SEQ ID NO: 57432 - DNA, 20 bp, synthetic construct
  misc_feature 1..20: note = chemically synthesized
  source 1..20: mol_type = other DNA
tggtctttccttaactgtat

SEQ ID NO: 57433 - DNA, 20 bp, synthetic construct
  misc_feature 1..20: note = chemically synthesized
  source 1..20: mol_type = other DNA
gtctttccttaactgtatta

SEQ ID NO: 57434 - DNA, 20 bp, synthetic construct
  misc_feature 1..20: note = chemically synthesized
  source 1..20: mol_type = other DNA
tccttaactgtattagagtc

SEQ ID NO: 57435 - DNA, 20 bp, synthetic construct
  misc_feature 1..20: note = chemically synthesized
  source 1..20: mol_type = other DNA
ccttaactgtattagagtct

SEQ ID NO: 57436 - DNA, 20 bp, synthetic construct
  misc_feature 1..20: note = chemically synthesized
  source 1..20: mol_type = other DNA
cttaactgtattagagtcta

SEQ ID NO: 57437 - DNA, 20 bp, synthetic construct
  misc_feature 1..20: note = chemically synthesized
  source 1..20: mol_type = other DNA
tagagtctagggtctgcctc

SEQ ID NO: 57438 - DNA, 20 bp, synthetic construct
  misc_feature 1..20: note = chemically synthesized
  source 1..20: mol_type = other DNA
tctagggtctgcctctggtt

SEQ ID NO: 57439 - DNA, 20 bp, synthetic construct
  misc_feature 1..20: note = chemically synthesized
  source 1..20: mol_type = other DNA
ctagggtctgcctctggttt

SEQ ID NO: 57440 - DNA, 20 bp, synthetic construct
  misc_feature 1..20: note = chemically synthesized
  source 1..20: mol_type = other DNA
agggtctgcctctggtttgg

SEQ ID NO: 57441 - DNA, 20 bp, synthetic construct
  misc_feature 1..20: note = chemically synthesized
  source 1..20: mol_type = other DNA
tgggagatcaacccccttcc

SEQ ID NO: 57442 - DNA, 20 bp, synthetic construct
  misc_feature 1..20: note = chemically synthesized
  source 1..20: mol_type = other DNA
atcaacccccttcctggtat

SEQ ID NO: 57443 - DNA, 20 bp, synthetic construct
  misc_feature 1..20: note = chemically synthesized
  source 1..20: mol_type = other DNA
ggtattggcctcatgtctct

SEQ ID NO: 57444 - DNA, 20 bp, synthetic construct
  misc_feature 1..20: note = chemically synthesized
  source 1..20: mol_type = other DNA
gtattggcctcatgtctctt

SEQ ID NO: 57445 - DNA, 20 bp, synthetic construct
  misc_feature 1..20: note = chemically synthesized
  source 1..20: mol_type = other DNA
tattggcctcatgtctctta

SEQ ID NO: 57446 - DNA, 20 bp, synthetic construct
  misc_feature 1..20: note = chemically synthesized
  source 1..20: mol_type = other DNA
ggcctcatgtctcttagggc

SEQ ID NO: 57447 - DNA, 20 bp, synthetic construct
  misc_feature 1..20: note = chemically synthesized
  source 1..20: mol_type = other DNA
tcatgtctcttagggccaga

SEQ ID NO: 57448 - DNA, 20 bp, synthetic construct
  misc_feature 1..20: note = chemically synthesized
  source 1..20: mol_type = other DNA
aaagtaatcgtttttgaatg

SEQ ID NO: 57449 - DNA, 20 bp, synthetic construct
  misc_feature 1..20: note = chemically synthesized
  source 1..20: mol_type = other DNA
taattcatttaatgacctta

SEQ ID NO: 57450 - DNA, 20 bp, synthetic construct
  misc_feature 1..20: note = chemically synthesized
  source 1..20: mol_type = other DNA
atttaatgaccttaaagtta

SEQ ID NO: 57451 - DNA, 20 bp, synthetic construct
  misc_feature 1..20: note = chemically synthesized
  source 1..20: mol_type = other DNA
gaccttaaagttacagccct

SEQ ID NO: 57452 - DNA, 20 bp, synthetic construct
  misc_feature 1..20: note = chemically synthesized
  source 1..20: mol_type = other DNA
tctctctcttttttttgaaa

SEQ ID NO: 57453 - DNA, 20 bp, synthetic construct
  misc_feature 1..20: note = chemically synthesized
  source 1..20: mol_type = other DNA
ctctctcttttttttgaaac

SEQ ID NO: 57454 - DNA, 20 bp, synthetic construct
  misc_feature 1..20: note = chemically synthesized
  source 1..20: mol_type = other DNA
tctctcttttttttgaaaca

SEQ ID NO: 57455 - DNA, 20 bp, synthetic construct
  misc_feature 1..20: note = chemically synthesized
  source 1..20: mol_type = other DNA
cagggtctcactctgtctcc

SEQ ID NO: 57456 - DNA, 20 bp, synthetic construct
  misc_feature 1..20: note = chemically synthesized
  source 1..20: mol_type = other DNA
agggtctcactctgtctccc

SEQ ID NO: 57457 - DNA, 20 bp, synthetic construct
  misc_feature 1..20: note = chemically synthesized
  source 1..20: mol_type = other DNA
tctcactctgtctcccaggc

SEQ ID NO: 57458 - DNA, 20 bp, synthetic construct
  misc_feature 1..20: note = chemically synthesized
  source 1..20: mol_type = other DNA
tcactctgtctcccaggctg

SEQ ID NO: 57459 - DNA, 20 bp, synthetic construct
  misc_feature 1..20: note = chemically synthesized
  source 1..20: mol_type = other DNA
ctgtctcccaggctggagtg

SEQ ID NO: 57460 - DNA, 20 bp, synthetic construct
  misc_feature 1..20: note = chemically synthesized
  source 1..20: mol_type = other DNA
tctcccaggctggagtgcag

SEQ ID NO: 57461 - DNA, 20 bp, synthetic construct
  misc_feature 1..20: note = chemically synthesized
  source 1..20: mol_type = other DNA
ggagtgcagtggcataatca

SEQ ID NO: 57462 - DNA, 20 bp, synthetic construct
  misc_feature 1..20: note = chemically synthesized
  source 1..20: mol_type = other DNA
ggcataatcacggctcactg

SEQ ID NO: 57463 - DNA, 20 bp, synthetic construct
  misc_feature 1..20: note = chemically synthesized
  source 1..20: mol_type = other DNA
tcactgcagcctcaacctcc

SEQ ID NO: 57464 - DNA, 20 bp, synthetic construct
  misc_feature 1..20: note = chemically synthesized
  source 1..20: mol_type = other DNA
cactgcagcctcaacctcct

SEQ ID NO: 57465 - DNA, 20 bp, synthetic construct
  misc_feature 1..20: note = chemically synthesized
  source 1..20: mol_type = other DNA
ctaatgtgatcctcccacct

SEQ ID NO: 57466 - DNA, 20 bp, synthetic construct
  misc_feature 1..20: note = chemically synthesized
  source 1..20: mol_type = other DNA
tcctcccacctcagcctcct

SEQ ID NO: 57467 - DNA, 20 bp, synthetic construct
  misc_feature 1..20: note = chemically synthesized
  source 1..20: mol_type = other DNA
tcccacctcagcctcctgag

SEQ ID NO: 57468 - DNA, 20 bp, synthetic construct
  misc_feature 1..20: note = chemically synthesized
  source 1..20: mol_type = other DNA
acctcagcctcctgagtagc

SEQ ID NO: 57469 - DNA, 20 bp, synthetic construct
  misc_feature 1..20: note = chemically synthesized
  source 1..20: mol_type = other DNA
cctcagcctcctgagtagct

SEQ ID NO: 57470 - DNA, 20 bp, synthetic construct
  misc_feature 1..20: note = chemically synthesized
  source 1..20: mol_type = other DNA
ctcctgagtagctgggacca

SEQ ID NO: 57471 - DNA, 20 bp, synthetic construct
  misc_feature 1..20: note = chemically synthesized
  source 1..20: mol_type = other DNA
tcctgagtagctgggaccac

SEQ ID NO: 57472 - DNA, 20 bp, synthetic construct
  misc_feature 1..20: note = chemically synthesized
  source 1..20: mol_type = other DNA
caggcacacgccaccatgcc

SEQ ID NO: 57473 - DNA, 20 bp, synthetic construct
  misc_feature 1..20: note = chemically synthesized
  source 1..20: mol_type = other DNA
gctaatttttctatcttttg

SEQ ID NO: 57474 - DNA, 20 bp, synthetic construct
  misc_feature 1..20: note = chemically synthesized
  source 1..20: mol_type = other DNA
taatttttctatcttttgta

SEQ ID NO: 57475 - DNA, 20 bp, synthetic construct
  misc_feature 1..20: note = chemically synthesized
  source 1..20: mol_type = other DNA
ttttctatcttttgtagaga

SEQ ID NO: 57476 - DNA, 20 bp, synthetic construct
  misc_feature 1..20: note = chemically synthesized
  source 1..20: mol_type = other DNA
tttctatcttttgtagagat

SEQ ID NO: 57477 - DNA, 20 bp, synthetic construct
  misc_feature 1..20: note = chemically synthesized
  source 1..20: mol_type = other DNA
ttctatcttttgtagagatg

SEQ ID NO: 57478 - DNA, 20 bp, synthetic construct
  misc_feature 1..20: note = chemically synthesized
  source 1..20: mol_type = other DNA
tggggtttttccatgttgcc

SEQ ID NO: 57479 - DNA, 20 bp, synthetic construct
  misc_feature 1..20: note = chemically synthesized
  source 1..20: mol_type = other DNA
ggggtttttccatgttgccc

SEQ ID NO: 57480 - DNA, 20 bp, synthetic construct
  misc_feature 1..20: note = chemically synthesized
  source 1..20: mol_type = other DNA
tttttccatgttgcccaggc

SEQ ID NO: 57481 - DNA, 20 bp, synthetic construct
  misc_feature 1..20: note = chemically synthesized
  source 1..20: mol_type = other DNA
caggctggtcttgaattcct

SEQ ID NO: 57482 - DNA, 20 bp, synthetic construct
  misc_feature 1..20: note = chemically synthesized
  source 1..20: mol_type = other DNA
ggtcttgaattcctgagctc

SEQ ID NO: 57483 - DNA, 20 bp, synthetic construct
  misc_feature 1..20: note = chemically synthesized
  source 1..20: mol_type = other DNA
tcttgaattcctgagctcaa

SEQ ID NO: 57484 - DNA, 20 bp, synthetic construct
  misc_feature 1..20: note = chemically synthesized
  source 1..20: mol_type = other DNA
cctgagctcaagagatctgc

SEQ ID NO: 57485 - DNA, 20 bp, synthetic construct
  misc_feature 1..20: note = chemically synthesized
  source 1..20: mol_type = other DNA
ctcaagagatctgccagtct

SEQ ID NO: 57486 - DNA, 20 bp, synthetic construct
  misc_feature 1..20: note = chemically synthesized
  source 1..20: mol_type = other DNA
ctgccagtcttggcttccca

SEQ ID NO: 57487 - DNA, 20 bp, synthetic construct
  misc_feature 1..20: note = chemically synthesized
  source 1..20: mol_type = other DNA
gtcttggcttcccaaagctc

SEQ ID NO: 57488 - DNA, 20 bp, synthetic construct
  misc_feature 1..20: note = chemically synthesized
  source 1..20: mol_type = other DNA
tcttggcttcccaaagctct

SEQ ID NO: 57489 - DNA, 20 bp, synthetic construct
  misc_feature 1..20: note = chemically synthesized
  source 1..20: mol_type = other DNA
ttcccaaagctctgggatta

SEQ ID NO: 57490 - DNA, 20 bp, synthetic construct
  misc_feature 1..20: note = chemically synthesized
  source 1..20: mol_type = other DNA
tcccaaagctctgggattac

SEQ ID NO: 57491 - DNA, 20 bp, synthetic construct
  misc_feature 1..20: note = chemically synthesized
  source 1..20: mol_type = other DNA
caggtgtgaaccaccatgcc

SEQ ID NO: 57492 - DNA, 20 bp, synthetic construct
  misc_feature 1..20: note = chemically synthesized
  source 1..20: mol_type = other DNA
gtgaaccaccatgcctggcc

SEQ ID NO: 57493 - DNA, 20 bp, synthetic construct
  misc_feature 1..20: note = chemically synthesized
  source 1..20: mol_type = other DNA
gtgttttaactcatacgttt

SEQ ID NO: 57494 - DNA, 20 bp, synthetic construct
  misc_feature 1..20: note = chemically synthesized
  source 1..20: mol_type = other DNA
taagcaaaataatgaatgta

SEQ ID NO: 57495 - DNA, 20 bp, synthetic construct
  misc_feature 1..20: note = chemically synthesized
  source 1..20: mol_type = other DNA
gcaacaatatgatgaatgta

SEQ ID NO: 57496 - DNA, 20 bp, synthetic construct
  misc_feature 1..20: note = chemically synthesized
  source 1..20: mol_type = other DNA
atgaatgtatggttccaaat

SEQ ID NO: 57497 - DNA, 20 bp, synthetic construct
  misc_feature 1..20: note = chemically synthesized
  source 1..20: mol_type = other DNA
atggttccaaataagaatac

SEQ ID NO: 57498 - DNA, 20 bp, synthetic construct
  misc_feature 1..20: note = chemically synthesized
  source 1..20: mol_type = other DNA
aaataagaataccagcaaaa

SEQ ID NO: 57499 - DNA, 20 bp, synthetic construct
  misc_feature 1..20: note = chemically synthesized
  source 1..20: mol_type = other DNA
aataccagcaaaatggtaac

SEQ ID NO: 57500 - DNA, 20 bp, synthetic construct
  misc_feature 1..20: note = chemically synthesized
  source 1..20: mol_type = other DNA
taccagcaaaatggtaactg

SEQ ID NO: 57501 - DNA, 20 bp, synthetic construct
  misc_feature 1..20: note = chemically synthesized
  source 1..20: mol_type = other DNA
aaatggtaactggagactta

SEQ ID NO: 57502 - DNA, 20 bp, synthetic construct
  misc_feature 1..20: note = chemically synthesized
  source 1..20: mol_type = other DNA
atggtaactggagacttaaa

SEQ ID NO: 57503 - DNA, 20 bp, synthetic construct
  misc_feature 1..20: note = chemically synthesized
  source 1..20: mol_type = other DNA
cttaaagagtttgaaacttt

SEQ ID NO: 57504 - DNA, 20 bp, synthetic construct
  misc_feature 1..20: note = chemically synthesized
  source 1..20: mol_type = other DNA
actttcagttatttttgaaa

SEQ ID NO: 57505 - DNA, 20 bp, synthetic construct
  misc_feature 1..20: note = chemically synthesized
  source 1..20: mol_type = other DNA
ctttcagttatttttgaaaa

SEQ ID NO: 57506 - DNA, 20 bp, synthetic construct
  misc_feature 1..20: note = chemically synthesized
  source 1..20: mol_type = other DNA
tttcagttatttttgaaaaa

SEQ ID NO: 57507 - DNA, 20 bp, synthetic construct
  misc_feature 1..20: note = chemically synthesized
  source 1..20: mol_type = other DNA
aaaaagggcttctatatctt

SEQ ID NO: 57508 - DNA, 20 bp, synthetic construct
  misc_feature 1..20: note = chemically synthesized
  source 1..20: mol_type = other DNA
ctttcttatacatatgtgtg

SEQ ID NO: 57509 - DNA, 20 bp, synthetic construct
  misc_feature 1..20: note = chemically synthesized
  source 1..20: mol_type = other DNA
atatgtgtgtagatatacaa

SEQ ID NO: 57510 - DNA, 20 bp, synthetic construct
  misc_feature 1..20: note = chemically synthesized
  source 1..20: mol_type = other DNA
gtgtgtagatatacaaaaga

SEQ ID NO: 57511 - DNA, 20 bp, synthetic construct
  misc_feature 1..20: note = chemically synthesized
  source 1..20: mol_type = other DNA
agatatacaaaagaaagctc

SEQ ID NO: 57512 - DNA, 20 bp, synthetic construct
  misc_feature 1..20: note = chemically synthesized
  source 1..20: mol_type = other DNA
tgtgtgtgtatactatatat

SEQ ID NO: 57513 - DNA, 20 bp, synthetic construct
  misc_feature 1..20: note = chemically synthesized
  source 1..20: mol_type = other DNA
actatatatcagcctacaaa

SEQ ID NO: 57514 - DNA, 20 bp, synthetic construct
  misc_feature 1..20: note = chemically synthesized
  source 1..20: mol_type = other DNA
atatatcagcctacaaatag

SEQ ID NO: 57515 - DNA, 20 bp, synthetic construct
  misc_feature 1..20: note = chemically synthesized
  source 1..20: mol_type = other DNA
atatcagcctacaaatagta

SEQ ID NO: 57516 - DNA, 20 bp, synthetic construct
  misc_feature 1..20: note = chemically synthesized
  source 1..20: mol_type = other DNA
atcagcctacaaatagtaga

SEQ ID NO: 57517 - DNA, 20 bp, synthetic construct
  misc_feature 1..20: note = chemically synthesized
  source 1..20: mol_type = other DNA
gagaccaaaaccctaacact

SEQ ID NO: 57518 - DNA, 20 bp, synthetic construct
  misc_feature 1..20: note = chemically synthesized
  source 1..20: mol_type = other DNA
agaccaaaaccctaacactt

SEQ ID NO: 57519 - DNA, 20 bp, synthetic construct
  misc_feature 1..20: note = chemically synthesized
  source 1..20: mol_type = other DNA
aaaccctaacacttgggtca

SEQ ID NO: 57520 - DNA, 20 bp, synthetic construct
  misc_feature 1..20: note = chemically synthesized
  source 1..20: mol_type = other DNA
accctaacacttgggtcacg

SEQ ID NO: 57521 - DNA, 20 bp, synthetic construct
  misc_feature 1..20: note = chemically synthesized
  source 1..20: mol_type = other DNA
ccctaacacttgggtcacgg

SEQ ID NO: 57522 - DNA, 20 bp, synthetic construct
  misc_feature 1..20: note = chemically synthesized
  source 1..20: mol_type = other DNA
tgggtcacggaggactgtga

SEQ ID NO: 57523 - DNA, 20 bp, synthetic construct
  misc_feature 1..20: note = chemically synthesized
  source 1..20: mol_type = other DNA
gggtcacggaggactgtgaa

SEQ ID NO: 57524 - DNA, 20 bp, synthetic construct
  misc_feature 1..20: note = chemically synthesized
  source 1..20: mol_type = other DNA
cggaggactgtgaaaggaac

SEQ ID NO: 57525 - DNA, 20 bp, synthetic construct
  misc_feature 1..20: note = chemically synthesized
  source 1..20: mol_type = other DNA
ggaggactgtgaaaggaacc

SEQ ID NO: 57526 - DNA, 20 bp, synthetic construct
  misc_feature 1..20: note = chemically synthesized
  source 1..20: mol_type = other DNA
gaggactgtgaaaggaacca

SEQ ID NO: 57527 - DNA, 20 bp, synthetic construct
  misc_feature 1..20: note = chemically synthesized
  source 1..20: mol_type = other DNA
aaaggaaccagggaatgaat

SEQ ID NO: 57528 - DNA, 20 bp, synthetic construct
  misc_feature 1..20: note = chemically synthesized
  source 1..20: mol_type = other DNA
aaggaaccagggaatgaatc

SEQ ID NO: 57529 - DNA, 20 bp, synthetic construct
  misc_feature 1..20: note = chemically synthesized
  source 1..20: mol_type = other DNA
aactcatgcattttaaaaaa

SEQ ID NO: 57530 - DNA, 20 bp, synthetic construct
  misc_feature 1..20: note = chemically synthesized
  source 1..20: mol_type = other DNA
actcatgcattttaaaaaat

SEQ ID NO: 57531 - DNA, 20 bp, synthetic construct
  misc_feature 1..20: note = chemically synthesized
  source 1..20: mol_type = other DNA
ctcatgcattttaaaaaata

SEQ ID NO: 57532 - DNA, 20 bp, synthetic construct
  misc_feature 1..20: note = chemically synthesized
  source 1..20: mol_type = other DNA
tatttatttatttatttttg

SEQ ID NO: 57533 - DNA, 20 bp, synthetic construct
  misc_feature 1..20: note = chemically synthesized
  source 1..20: mol_type = other DNA
tttatttatttttgtagaaa

SEQ ID NO: 57534 - DNA, 20 bp, synthetic construct
  misc_feature 1..20: note = chemically synthesized
  source 1..20: mol_type = other DNA
ttatttatttttgtagaaac

SEQ ID NO: 57535 - DNA, 20 bp, synthetic construct
  misc_feature 1..20: note = chemically synthesized
  source 1..20: mol_type = other DNA
tatttatttttgtagaaacg

SEQ ID NO: 57536 - DNA, 20 bp, synthetic construct
  misc_feature 1..20: note = chemically synthesized
  source 1..20: mol_type = other DNA
agaaacggggtctcactatg

SEQ ID NO: 57537 - DNA, 20 bp, synthetic construct
  misc_feature 1..20: note = chemically synthesized
  source 1..20: mol_type = other DNA
cggggtctcactatgcggcc

SEQ ID NO: 57538 - DNA, 20 bp, synthetic construct
  misc_feature 1..20: note = chemically synthesized
  source 1..20: mol_type = other DNA
ggggtctcactatgcggccc

SEQ ID NO: 57539 - DNA, 20 bp, synthetic construct
  misc_feature 1..20: note = chemically synthesized
  source 1..20: mol_type = other DNA
tctcactatgcggcccaggc

SEQ ID NO: 57540 - DNA, 20 bp, synthetic construct
  misc_feature 1..20: note = chemically synthesized
  source 1..20: mol_type = other DNA
ccaggctggtctcaaattcc

SEQ ID NO: 57541 - DNA, 20 bp, synthetic construct
  misc_feature 1..20: note = chemically synthesized
  source 1..20: mol_type = other DNA
ggtctcaaattcctggcttc

SEQ ID NO: 57542 - DNA, 20 bp, synthetic construct
  misc_feature 1..20: note = chemically synthesized
  source 1..20: mol_type = other DNA
gtgatcctcccgcctcaacc

SEQ ID NO: 57543 - DNA, 20 bp, synthetic construct
  misc_feature 1..20: note = chemically synthesized
  source 1..20: mol_type = other DNA
cctcccgcctcaacctagca

SEQ ID NO: 57544 - DNA, 20 bp, synthetic construct
  misc_feature 1..20: note = chemically synthesized
  source 1..20: mol_type = other DNA
gcctcaacctagcaaagcat

SEQ ID NO: 57545 - DNA, 20 bp, synthetic construct
  misc_feature 1..20: note = chemically synthesized
  source 1..20: mol_type = other DNA
cctcaacctagcaaagcatt

SEQ ID NO: 57546 - DNA, 20 bp, synthetic construct
  misc_feature 1..20: note = chemically synthesized
  source 1..20: mol_type = other DNA
ctagcaaagcattgggatta

SEQ ID NO: 57547 - DNA, 20 bp, synthetic construct
  misc_feature 1..20: note = chemically synthesized
  source 1..20: mol_type = other DNA
tagcaaagcattgggattac

SEQ ID NO: 57548 - DNA, 20 bp, synthetic construct
  misc_feature 1..20: note = chemically synthesized
  source 1..20: mol_type = other DNA
agcattgggattacaggcat

SEQ ID NO: 57549 - DNA, 20 bp, synthetic construct
  misc_feature 1..20: note = chemically synthesized
  source 1..20: mol_type = other DNA
tccaaattcatgcatttttt

SEQ ID NO: 57550 - DNA, 20 bp, synthetic construct
  misc_feature 1..20: note = chemically synthesized
  source 1..20: mol_type = other DNA
ccaaattcatgcattttttg

SEQ ID NO: 57551 - DNA, 20 bp, synthetic construct
  misc_feature 1..20: note = chemically synthesized
  source 1..20: mol_type = other DNA
ttcatgcattttttgaggat

SEQ ID NO: 57552 - DNA, 20 bp, synthetic construct
  misc_feature 1..20: note = chemically synthesized
  source 1..20: mol_type = other DNA
catgcattttttgaggataa

SEQ ID NO: 57553 - DNA, 20 bp, synthetic construct
  misc_feature 1..20: note = chemically synthesized
  source 1..20: mol_type = other DNA
cattttttgaggataagagc

SEQ ID NO: 57554 - DNA, 20 bp, synthetic construct
  misc_feature 1..20: note = chemically synthesized
  source 1..20: mol_type = other DNA
attttttgaggataagagcc

SEQ ID NO: 57555 - DNA, 20 bp, synthetic construct
  misc_feature 1..20: note = chemically synthesized
  source 1..20: mol_type = other DNA
ttttttgaggataagagcca

SEQ ID NO: 57556 - DNA, 20 bp, synthetic construct
  misc_feature 1..20: note = chemically synthesized
  source 1..20: mol_type = other DNA
tttttgaggataagagccag

SEQ ID NO: 57557 - DNA, 20 bp, synthetic construct
  misc_feature 1..20: note = chemically synthesized
  source 1..20: mol_type = other DNA
ttttgaggataagagccagg

SEQ ID NO: 57558 - DNA, 20 bp, synthetic construct
  misc_feature 1..20: note = chemically synthesized
  source 1..20: mol_type = other DNA
tgcctgaatttcccatcatt

SEQ ID NO: 57559 - DNA, 20 bp, synthetic construct
  misc_feature 1..20: note = chemically synthesized
  source 1..20: mol_type = other DNA
ttaagtccatattgacatgt

SEQ ID NO: 57560 - DNA, 20 bp, synthetic construct
  misc_feature 1..20: note = chemically synthesized
  source 1..20: mol_type = other DNA
taagtccatattgacatgta

SEQ ID NO: 57561 - DNA, 20 bp, synthetic construct
  misc_feature 1..20: note = chemically synthesized
  source 1..20: mol_type = other DNA
aagtccatattgacatgtaa

SEQ ID NO: 57562 - DNA, 20 bp, synthetic construct
  misc_feature 1..20: note = chemically synthesized
  source 1..20: mol_type = other DNA
agtccatattgacatgtaag

SEQ ID NO: 57563 - DNA, 20 bp, synthetic construct
  misc_feature 1..20: note = chemically synthesized
  source 1..20: mol_type = other DNA
ccatattgacatgtaagggg

SEQ ID NO: 57564 - DNA, 20 bp, synthetic construct
  misc_feature 1..20: note = chemically synthesized
  source 1..20: mol_type = other DNA
attgacatgtaaggggtagc

SEQ ID NO: 57565 - DNA, 20 bp, synthetic construct
  misc_feature 1..20: note = chemically synthesized
  source 1..20: mol_type = other DNA
ttgacatgtaaggggtagct

SEQ ID NO: 57566 - DNA, 20 bp, synthetic construct
  misc_feature 1..20: note = chemically synthesized
  source 1..20: mol_type = other DNA
tgacatgtaaggggtagctg

SEQ ID NO: 57567 - DNA, 20 bp, synthetic construct
  misc_feature 1..20: note = chemically synthesized
  source 1..20: mol_type = other DNA
atgtaaggggtagctgggga

SEQ ID NO: 57568 - DNA, 20 bp, synthetic construct
  misc_feature 1..20: note = chemically synthesized
  source 1..20: mol_type = other DNA
gggtagctggggacagaaaa

SEQ ID NO: 57569 - DNA, 20 bp, synthetic construct
  misc_feature 1..20: note = chemically synthesized
  source 1..20: mol_type = other DNA
ggggacagaaaaaagaaact

SEQ ID NO: 57570 - DNA, 20 bp, synthetic construct
  misc_feature 1..20: note = chemically synthesized
  source 1..20: mol_type = other DNA
ggacagaaaaaagaaactca

SEQ ID NO: 57571 - DNA, 20 bp, synthetic construct
  misc_feature 1..20: note = chemically synthesized
  source 1..20: mol_type = other DNA
actcagagctaatgaatctg

SEQ ID NO: 57572 - DNA, 20 bp, synthetic construct
  misc_feature 1..20: note = chemically synthesized
  source 1..20: mol_type = other DNA
agctaatgaatctgtggcaa

SEQ ID NO: 57573 - DNA, 20 bp, synthetic construct
  misc_feature 1..20: note = chemically synthesized
  source 1..20: mol_type = other DNA
gaatctgtggcaaaagttga

SEQ ID NO: 57574 - DNA, 20 bp, synthetic construct
  misc_feature 1..20: note = chemically synthesized
  source 1..20: mol_type = other DNA
aagttgacagcattccatgc

SEQ ID NO: 57575 - DNA, 20 bp, synthetic construct
  misc_feature 1..20: note = chemically synthesized
  source 1..20: mol_type = other DNA
gaaatgattaaaacatcctc

SEQ ID NO: 57576 - DNA, 20 bp, synthetic construct
  misc_feature 1..20: note = chemically synthesized
  source 1..20: mol_type = other DNA
aaatgattaaaacatcctcc

SEQ ID NO: 57577 - DNA, 20 bp, synthetic construct
  misc_feature 1..20: note = chemically synthesized
  source 1..20: mol_type = other DNA
atgattaaaacatcctccag

SEQ ID NO: 57578 - DNA, 20 bp, synthetic construct
  misc_feature 1..20: note = chemically synthesized
  source 1..20: mol_type = other DNA
tgattaaaacatcctccagg

SEQ ID NO: 57579 - DNA, 20 bp, synthetic construct
  misc_feature 1..20: note = chemically synthesized
  source 1..20: mol_type = other DNA
atcctccaggaggtatgacc

SEQ ID NO: 57580 - DNA, 20 bp, synthetic construct
  misc_feature 1..20: note = chemically synthesized
  source 1..20: mol_type = other DNA
cctccaggaggtatgacctg

SEQ ID NO: 57581 - DNA, 20 bp, synthetic construct
  misc_feature 1..20: note = chemically synthesized
  source 1..20: mol_type = other DNA
agtctcctccccaccccacc

SEQ ID NO: 57582 - DNA, 20 bp, synthetic construct
  misc_feature 1..20: note = chemically synthesized
  source 1..20: mol_type = other DNA
gtctcctccccaccccacca

SEQ ID NO: 57583 - DNA, 20 bp, synthetic construct
  misc_feature 1..20: note = chemically synthesized
  source 1..20: mol_type = other DNA
tctcctccccaccccaccaa

SEQ ID NO: 57584 - DNA, 20 bp, synthetic construct
  misc_feature 1..20: note = chemically synthesized
  source 1..20: mol_type = other DNA
ccccaccaagggctcgcacc

SEQ ID NO: 57585 - DNA, 20 bp, synthetic construct
  misc_feature 1..20: note = chemically synthesized
  source 1..20: mol_type = other DNA
cacccagcccatgctgactc

SEQ ID NO: 57586 - DNA, 20 bp, synthetic construct
  misc_feature 1..20: note = chemically synthesized
  source 1..20: mol_type = other DNA
tccagttgtccttgactgca

SEQ ID NO: 57587 - DNA, 20 bp, synthetic construct
  misc_feature 1..20: note = chemically synthesized
  source 1..20: mol_type = other DNA
cttgactgcatggtttctgc

SEQ ID NO: 57588 - DNA, 20 bp, synthetic construct
  misc_feature 1..20: note = chemically synthesized
  source 1..20: mol_type = other DNA
tgcatggtttctgctggtcc

SEQ ID NO: 57589 - DNA, 20 bp, synthetic construct
  misc_feature 1..20: note = chemically synthesized
  source 1..20: mol_type = other DNA
tctcctgccacgcctaacct

SEQ ID NO: 57590 - DNA, 20 bp, synthetic construct
  misc_feature 1..20: note = chemically synthesized
  source 1..20: mol_type = other DNA
tcctgccacgcctaaccttg

SEQ ID NO: 57591 - DNA, 20 bp, synthetic construct
  misc_feature 1..20: note = chemically synthesized
  source 1..20: mol_type = other DNA
ctgccacgcctaaccttgga

SEQ ID NO: 57592 - DNA, 20 bp, synthetic construct
  misc_feature 1..20: note = chemically synthesized
  source 1..20: mol_type = other DNA
ccacgcctaaccttggagag

SEQ ID NO: 57593 - DNA, 20 bp, synthetic construct
  misc_feature 1..20: note = chemically synthesized
  source 1..20: mol_type = other DNA
cacgcctaaccttggagagc

SEQ ID NO: 57594 - DNA, 20 bp, synthetic construct
  misc_feature 1..20: note = chemically synthesized
  source 1..20: mol_type = other DNA
ttggagagcaggtaatgtgt

SEQ ID NO: 57595 - DNA, 20 bp, synthetic construct
  misc_feature 1..20: note = chemically synthesized
  source 1..20: mol_type = other DNA
aggtaatgtgttggtgactg

SEQ ID NO: 57596 - DNA, 20 bp, synthetic construct
  misc_feature 1..20: note = chemically synthesized
  source 1..20: mol_type = other DNA
ggtaatgtgttggtgactgt

SEQ ID NO: 57597 - DNA, 20 bp, synthetic construct
  misc_feature 1..20: note = chemically synthesized
  source 1..20: mol_type = other DNA
aatgtgttggtgactgtggg

SEQ ID NO: 57598 - DNA, 20 bp, synthetic construct
  misc_feature 1..20: note = chemically synthesized
  source 1..20: mol_type = other DNA
atgtgttggtgactgtgggt

SEQ ID NO: 57599 - DNA, 20 bp, synthetic construct
  misc_feature 1..20: note = chemically synthesized
  source 1..20: mol_type = other DNA
ggtgactgtgggtgggtgta

SEQ ID NO: 57600 - DNA, 20 bp, synthetic construct
  misc_feature 1..20: note = chemically synthesized
  source 1..20: mol_type = other DNA
actgtgggtgggtgtaaagt

SEQ ID NO: 57601 - DNA, 20 bp, synthetic construct
  misc_feature 1..20: note = chemically synthesized
  source 1..20: mol_type = other DNA
gtgtaaagtaagcccatgcg

SEQ ID NO: 57602 - DNA, 20 bp, synthetic construct
  misc_feature 1..20: note = chemically synthesized
  source 1..20: mol_type = other DNA
taaagtaagcccatgcgtgg

SEQ ID NO: 57603 - DNA, 20 bp, synthetic construct
  misc_feature 1..20: note = chemically synthesized
  source 1..20: mol_type = other DNA
aaagtaagcccatgcgtggc

SEQ ID NO: 57604 - DNA, 20 bp, synthetic construct
  misc_feature 1..20: note = chemically synthesized
  source 1..20: mol_type = other DNA
gtaagcccatgcgtggcagg

SEQ ID NO: 57605 - DNA, 20 bp, synthetic construct
  misc_feature 1..20: note = chemically synthesized
  source 1..20: mol_type = other DNA
ccatgcgtggcaggcagtgc

SEQ ID NO: 57606 - DNA, 20 bp, synthetic construct
  misc_feature 1..20: note = chemically synthesized
  source 1..20: mol_type = other DNA
catgcgtggcaggcagtgct

SEQ ID NO: 57607 - DNA, 20 bp, synthetic construct
  misc_feature 1..20: note = chemically synthesized
  source 1..20: mol_type = other DNA
atgcgtggcaggcagtgctg

SEQ ID NO: 57608 - DNA, 20 bp, synthetic construct
  misc_feature 1..20: note = chemically synthesized
  source 1..20: mol_type = other DNA
tggcaggcagtgctggggcg

SEQ ID NO: 57609 - DNA, 20 bp, synthetic construct
  misc_feature 1..20: note = chemically synthesized
  source 1..20: mol_type = other DNA
ggcaggcagtgctggggcgt

SEQ ID NO: 57610 - DNA, 20 bp, synthetic construct
  misc_feature 1..20: note = chemically synthesized
  source 1..20: mol_type = other DNA
gcaggcagtgctggggcgtg

SEQ ID NO: 57611 - DNA, 20 bp, synthetic construct
  misc_feature 1..20: note = chemically synthesized
  source 1..20: mol_type = other DNA
gtatatgtgatctgcactgt

SEQ ID NO: 57612 - DNA, 20 bp, synthetic construct
  misc_feature 1..20: note = chemically synthesized
  source 1..20: mol_type = other DNA
tatatgtgatctgcactgtc

SEQ ID NO: 57613 - DNA, 20 bp, synthetic construct
  misc_feature 1..20: note = chemically synthesized
  source 1..20: mol_type = other DNA
atatgtgatctgcactgtca

SEQ ID NO: 57614 - DNA, 20 bp, synthetic construct
  misc_feature 1..20: note = chemically synthesized
  source 1..20: mol_type = other DNA
atctgcactgtcagggctgc

SEQ ID NO: 57615 - DNA, 20 bp, synthetic construct
  misc_feature 1..20: note = chemically synthesized
  source 1..20: mol_type = other DNA
tctgcactgtcagggctgct

SEQ ID NO: 57616 - DNA, 20 bp, synthetic construct
  misc_feature 1..20: note = chemically synthesized
  source 1..20: mol_type = other DNA
ctgtcagggctgctgggcca

SEQ ID NO: 57617 - DNA, 20 bp, synthetic construct
  misc_feature 1..20: note = chemically synthesized
  source 1..20: mol_type = other DNA
tgtcagggctgctgggccat

SEQ ID NO: 57618 - DNA, 20 bp, synthetic construct
  misc_feature 1..20: note = chemically synthesized
  source 1..20: mol_type = other DNA
cagggctgctgggccatagg

SEQ ID NO: 57619 - DNA, 20 bp, synthetic construct
  misc_feature 1..20: note = chemically synthesized
  source 1..20: mol_type = other DNA
agggctgctgggccataggt

SEQ ID NO: 57620 - DNA, 20 bp, synthetic construct
  misc_feature 1..20: note = chemically synthesized
  source 1..20: mol_type = other DNA
gggctgctgggccataggta

SEQ ID NO: 57621 - DNA, 20 bp, synthetic construct
  misc_feature 1..20: note = chemically synthesized
  source 1..20: mol_type = other DNA
gctgctgggccataggtagg

SEQ ID NO: 57622 - DNA, 20 bp, synthetic construct
  misc_feature 1..20: note = chemically synthesized
  source 1..20: mol_type = other DNA
gtagggagcctccctctacc

SEQ ID NO: 57623 - DNA, 20 bp, synthetic construct
  misc_feature 1..20: note = chemically synthesized
  source 1..20: mol_type = other DNA
gagcctccctctacccagat

SEQ ID NO: 57624 - DNA, 20 bp, synthetic construct
  misc_feature 1..20: note = chemically synthesized
  source 1..20: mol_type = other DNA
acccagataagcctctgttg

SEQ ID NO: 57625 - DNA, 20 bp, synthetic construct
  misc_feature 1..20: note = chemically synthesized
  source 1..20: mol_type = other DNA
ccagataagcctctgttgtg

SEQ ID NO: 57626 - DNA, 20 bp, synthetic construct
  misc_feature 1..20: note = chemically synthesized
  source 1..20: mol_type = other DNA
ctgttgtggagtaactattg

SEQ ID NO: 57627 - DNA, 20 bp, synthetic construct
  misc_feature 1..20: note = chemically synthesized
  source 1..20: mol_type = other DNA
gtaactattgcagtgacctc

SEQ ID NO: 57628 - DNA, 20 bp, synthetic construct
  misc_feature 1..20: note = chemically synthesized
  source 1..20: mol_type = other DNA
taactattgcagtgacctct

SEQ ID NO: 57629 - DNA, 20 bp, synthetic construct
  misc_feature 1..20: note = chemically synthesized
  source 1..20: mol_type = other DNA
attgcagtgacctctgggat

SEQ ID NO: 57630 - DNA, 20 bp, synthetic construct
  misc_feature 1..20: note = chemically synthesized
  source 1..20: mol_type = other DNA
tgcagtgacctctgggatga

SEQ ID NO: 57631 - DNA, 20 bp, synthetic construct
  misc_feature 1..20: note = chemically synthesized
  source 1..20: mol_type = other DNA
ctctgggatgagagtttcta

SEQ ID NO: 57632 - DNA, 20 bp, synthetic construct
  misc_feature 1..20: note = chemically synthesized
  source 1..20: mol_type = other DNA
gggatgagagtttctatggt

SEQ ID NO: 57633 - DNA, 20 bp, synthetic construct
  misc_feature 1..20: note = chemically synthesized
  source 1..20: mol_type = other DNA
gatgagagtttctatggtca

SEQ ID NO: 57634 - DNA, 20 bp, synthetic construct
  misc_feature 1..20: note = chemically synthesized
  source 1..20: mol_type = other DNA
atgagagtttctatggtcag

SEQ ID NO: 57635 - DNA, 20 bp, synthetic construct
  misc_feature 1..20: note = chemically synthesized
  source 1..20: mol_type = other DNA
gagtttctatggtcagaggt

SEQ ID NO: 57636 - DNA, 20 bp, synthetic construct
  misc_feature 1..20: note = chemically synthesized
  source 1..20: mol_type = other DNA
tctatggtcagaggtgagtc

SEQ ID NO: 57637 - DNA, 20 bp, synthetic construct
  misc_feature 1..20: note = chemically synthesized
  source 1..20: mol_type = other DNA
ctatggtcagaggtgagtca

SEQ ID NO: 57638 - DNA, 20 bp, synthetic construct
  misc_feature 1..20: note = chemically synthesized
  source 1..20: mol_type = other DNA
ggtcagaggtgagtcaaggt

SEQ ID NO: 57639 - DNA, 20 bp, synthetic construct
  misc_feature 1..20: note = chemically synthesized
  source 1..20: mol_type = other DNA
tgagtctaaaaacatataca

SEQ ID NO: 57640 - DNA, 20 bp, synthetic construct
  misc_feature 1..20: note = chemically synthesized
  source 1..20: mol_type = other DNA
gagtctaaaaacatatacaa

SEQ ID NO: 57641 - DNA, 20 bp, synthetic construct
  misc_feature 1..20: note = chemically synthesized
  source 1..20: mol_type = other DNA
catatacaaaggccactgtc

SEQ ID NO: 57642 - DNA, 20 bp, synthetic construct
  misc_feature 1..20: note = chemically synthesized
  source 1..20: mol_type = other DNA
atatacaaaggccactgtct

SEQ ID NO: 57643 - DNA, 20 bp, synthetic construct
  misc_feature 1..20: note = chemically synthesized
  source 1..20: mol_type = other DNA
ggccactgtctgggtcatgc

SEQ ID NO: 57644 - DNA, 20 bp, synthetic construct
  misc_feature 1..20: note = chemically synthesized
  source 1..20: mol_type = other DNA
gccactgtctgggtcatgcc

SEQ ID NO: 57645 - DNA, 20 bp, synthetic construct
  misc_feature 1..20: note = chemically synthesized
  source 1..20: mol_type = other DNA
ccactgtctgggtcatgcca

SEQ ID NO: 57646 - DNA, 20 bp, synthetic construct
  misc_feature 1..20: note = chemically synthesized
  source 1..20: mol_type = other DNA
ctgtctgggtcatgccaggg

SEQ ID NO: 57647 - DNA, 20 bp, synthetic construct
  misc_feature 1..20: note = chemically synthesized
  source 1..20: mol_type = other DNA
ctgggtcatgccagggcagc

SEQ ID NO: 57648 - DNA, 20 bp, synthetic construct
  misc_feature 1..20: note = chemically synthesized
  source 1..20: mol_type = other DNA
ggtcatgccagggcagctag

SEQ ID NO: 57649 - DNA, 20 bp, synthetic construct
  misc_feature 1..20: note = chemically synthesized
  source 1..20: mol_type = other DNA
atgccagggcagctagcagc

SEQ ID NO: 57650 - DNA, 20 bp, synthetic construct
  misc_feature 1..20: note = chemically synthesized
  source 1..20: mol_type = other DNA
tgccagggcagctagcagcc

SEQ ID NO: 57651 - DNA, 20 bp, synthetic construct
  misc_feature 1..20: note = chemically synthesized
  source 1..20: mol_type = other DNA
gccagggcagctagcagcca

SEQ ID NO: 57652 - DNA, 20 bp, synthetic construct
  misc_feature 1..20: note = chemically synthesized
  source 1..20: mol_type = other DNA
agctagcagccagggtctct

SEQ ID NO: 57653 - DNA, 20 bp, synthetic construct
  misc_feature 1..20: note = chemically synthesized
  source 1..20: mol_type = other DNA
agcagccagggtctctgagt

SEQ ID NO: 57654 - DNA, 20 bp, synthetic construct
  misc_feature 1..20: note = chemically synthesized
  source 1..20: mol_type = other DNA
gcagccagggtctctgagtt

SEQ ID NO: 57655 - DNA, 20 bp, synthetic construct
  misc_feature 1..20: note = chemically synthesized
  source 1..20: mol_type = other DNA
agccagggtctctgagttgg

SEQ ID NO: 57656 - DNA, 20 bp, synthetic construct
  misc_feature 1..20: note = chemically synthesized
  source 1..20: mol_type = other DNA
gccagggtctctgagttggg

SEQ ID NO: 57657 - DNA, 20 bp, synthetic construct
  misc_feature 1..20: note = chemically synthesized
  source 1..20: mol_type = other DNA
ccagggtctctgagttggga

SEQ ID NO: 57658 - DNA, 20 bp, synthetic construct
  misc_feature 1..20: note = chemically synthesized
  source 1..20: mol_type = other DNA
cagggtctctgagttgggag

SEQ ID NO: 57659 - DNA, 20 bp, synthetic construct
  misc_feature 1..20: note = chemically synthesized
  source 1..20: mol_type = other DNA
ttgggaggggttctattatg

SEQ ID NO: 57660 - DNA, 20 bp, synthetic construct
  misc_feature 1..20: note = chemically synthesized
  source 1..20: mol_type = other DNA
gaggggttctattatgtggt

SEQ ID NO: 57661 - DNA, 20 bp, synthetic construct
  misc_feature 1..20: note = chemically synthesized
  source 1..20: mol_type = other DNA
tctattatgtggtcagcata

SEQ ID NO: 57662 - DNA, 20 bp, synthetic construct
  misc_feature 1..20: note = chemically synthesized
  source 1..20: mol_type = other DNA
ctattatgtggtcagcatat

SEQ ID NO: 57663 - DNA, 20 bp, synthetic construct
  misc_feature 1..20: note = chemically synthesized
  source 1..20: mol_type = other DNA
tattatgtggtcagcatatg

SEQ ID NO: 57664 - DNA, 20 bp, synthetic construct
  misc_feature 1..20: note = chemically synthesized
  source 1..20: mol_type = other DNA
ttatgtggtcagcatatggg

SEQ ID NO: 57665 - DNA, 20 bp, synthetic construct
  misc_feature 1..20: note = chemically synthesized
  source 1..20: mol_type = other DNA
tatgtggtcagcatatgggg

SEQ ID NO: 57666 - DNA, 20 bp, synthetic construct
  misc_feature 1..20: note = chemically synthesized
  source 1..20: mol_type = other DNA
atgtggtcagcatatgggga

SEQ ID NO: 57667 - DNA, 20 bp, synthetic construct
  misc_feature 1..20: note = chemically synthesized
  source 1..20: mol_type = other DNA
tggggagggccctgttttct

SEQ ID NO: 57668 - DNA, 20 bp, synthetic construct
  misc_feature 1..20: note = chemically synthesized
  source 1..20: mol_type = other DNA
ccctgttttctgagacgcct

SEQ ID NO: 57669 - DNA, 20 bp, synthetic construct
  misc_feature 1..20: note = chemically synthesized
  source 1..20: mol_type = other DNA
cctgttttctgagacgcctc

SEQ ID NO: 57670 - DNA, 20 bp, synthetic construct
  misc_feature 1..20: note = chemically synthesized
  source 1..20: mol_type = other DNA
gttttctgagacgcctcagg

SEQ ID NO: 57671 - DNA, 20 bp, synthetic construct
  misc_feature 1..20: note = chemically synthesized
  source 1..20: mol_type = other DNA
cctcaggaagaataccccta

SEQ ID NO: 57672 - DNA, 20 bp, synthetic construct
  misc_feature 1..20: note = chemically synthesized
  source 1..20: mol_type = other DNA
ggaagaatacccctatggat

SEQ ID NO: 57673 - DNA, 20 bp, synthetic construct
  misc_feature 1..20: note = chemically synthesized
  source 1..20: mol_type = other DNA
gaagaatacccctatggata

SEQ ID NO: 57674 - DNA, 20 bp, synthetic construct
  misc_feature 1..20: note = chemically synthesized
  source 1..20: mol_type = other DNA
agaatacccctatggataag

SEQ ID NO: 57675 - DNA, 20 bp, synthetic construct
  misc_feature 1..20: note = chemically synthesized
  source 1..20: mol_type = other DNA
cctatggataaggagttgat

SEQ ID NO: 57676 - DNA, 20 bp, synthetic construct
  misc_feature 1..20: note = chemically synthesized
  source 1..20: mol_type = other DNA
gataaggagttgataagtga

SEQ ID NO: 57677 - DNA, 20 bp, synthetic construct
  misc_feature 1..20: note = chemically synthesized
  source 1..20: mol_type = other DNA
taaggagttgataagtgatg

SEQ ID NO: 57678 - DNA, 20 bp, synthetic construct
  misc_feature 1..20: note = chemically synthesized
  source 1..20: mol_type = other DNA
atggagttgacatcccactc

SEQ ID NO: 57679 - DNA, 20 bp, synthetic construct
  misc_feature 1..20: note = chemically synthesized
  source 1..20: mol_type = other DNA
tggagttgacatcccactct

SEQ ID NO: 57680 - DNA, 20 bp, synthetic construct
  misc_feature 1..20: note = chemically synthesized
  source 1..20: mol_type = other DNA
gacatcccactctgggcatc

SEQ ID NO: 57681 - DNA, 20 bp, synthetic construct
  misc_feature 1..20: note = chemically synthesized
  source 1..20: mol_type = other DNA
acatcccactctgggcatcc

SEQ ID NO: 57682 - DNA, 20 bp, synthetic construct
  misc_feature 1..20: note = chemically synthesized
  source 1..20: mol_type = other DNA
catcccactctgggcatcca

SEQ ID NO: 57683 - DNA, 20 bp, synthetic construct
  misc_feature 1..20: note = chemically synthesized
  source 1..20: mol_type = other DNA
ccactctgggcatccaggga

SEQ ID NO: 57684 - DNA, 20 bp, synthetic construct
  misc_feature 1..20: note = chemically synthesized
  source 1..20: mol_type = other DNA
ctctgggcatccagggacag

SEQ ID NO: 57685 - DNA, 20 bp, synthetic construct
  misc_feature 1..20: note = chemically synthesized
  source 1..20: mol_type = other DNA
tctgggcatccagggacagt

SEQ ID NO: 57686 - DNA, 20 bp, synthetic construct
  misc_feature 1..20: note = chemically synthesized
  source 1..20: mol_type = other DNA
tgggcatccagggacagtgg

SEQ ID NO: 57687 - DNA, 20 bp, synthetic construct
  misc_feature 1..20: note = chemically synthesized
  source 1..20: mol_type = other DNA
agggacagtgggagtcttcc

SEQ ID NO: 57688 - DNA, 20 bp, synthetic construct
  misc_feature 1..20: note = chemically synthesized
  source 1..20: mol_type = other DNA
gacagtgggagtcttcctgg

SEQ ID NO: 57689 - DNA, 20 bp, synthetic construct
  misc_feature 1..20: note = chemically synthesized
  source 1..20: mol_type = other DNA
agtgggagtcttcctggcgg

SEQ ID NO: 57690 - DNA, 20 bp, synthetic construct
  misc_feature 1..20: note = chemically synthesized
  source 1..20: mol_type = other DNA
gtgggagtcttcctggcggt

SEQ ID NO: 57691 - DNA, 20 bp, synthetic construct
  misc_feature 1..20: note = chemically synthesized
  source 1..20: mol_type = other DNA
tcttcctggcggtgggccac

SEQ ID NO: 57692 - DNA, 20 bp, synthetic construct
  misc_feature 1..20: note = chemically synthesized
  source 1..20: mol_type = other DNA
cttcctggcggtgggccacc

SEQ ID NO: 57693 - DNA, 20 bp, synthetic construct
  misc_feature 1..20: note = chemically synthesized
  source 1..20: mol_type = other DNA
cctggcggtgggccaccagg

SEQ ID NO: 57694 - DNA, 20 bp, synthetic construct
  misc_feature 1..20: note = chemically synthesized
  source 1..20: mol_type = other DNA
ctggcggtgggccaccaggc

SEQ ID NO: 57695 - DNA, 20 bp, synthetic construct
  misc_feature 1..20: note = chemically synthesized
  source 1..20: mol_type = other DNA
tggcggtgggccaccaggca

SEQ ID NO: 57696 - DNA, 20 bp, synthetic construct
  misc_feature 1..20: note = chemically synthesized
  source 1..20: mol_type = other DNA
ggcggtgggccaccaggcag

SEQ ID NO: 57697 - DNA, 20 bp, synthetic construct
  misc_feature 1..20: note = chemically synthesized
  source 1..20: mol_type = other DNA
gcggtgggccaccaggcagg

SEQ ID NO: 57698 - DNA, 20 bp, synthetic construct
  misc_feature 1..20: note = chemically synthesized
  source 1..20: mol_type = other DNA
caccaggcagggggaccctc

SEQ ID NO: 57699 - DNA, 20 bp, synthetic construct
  misc_feature 1..20: note = chemically synthesized
  source 1..20: mol_type = other DNA
ggcagggggaccctctggat

SEQ ID NO: 57700 - DNA, 20 bp, synthetic construct
  misc_feature 1..20: note = chemically synthesized
  source 1..20: mol_type = other DNA
cagggggaccctctggatca

SEQ ID NO: 57701 - DNA, 20 bp, synthetic construct
  misc_feature 1..20: note = chemically synthesized
  source 1..20: mol_type = other DNA
tctggatcagagcaacctca

SEQ ID NO: 57702 - DNA, 20 bp, synthetic construct
  misc_feature 1..20: note = chemically synthesized
  source 1..20: mol_type = other DNA
cagagcaacctcatagtcat

SEQ ID NO: 57703 - DNA, 20 bp, synthetic construct
  misc_feature 1..20: note = chemically synthesized
  source 1..20: mol_type = other DNA
cctcatagtcatgagacgat

SEQ ID NO: 57704 - DNA, 20 bp, synthetic construct
  misc_feature 1..20: note = chemically synthesized
  source 1..20: mol_type = other DNA
atagtcatgagacgatgagc

SEQ ID NO: 57705 - DNA, 20 bp, synthetic construct
  misc_feature 1..20: note = chemically synthesized
  source 1..20: mol_type = other DNA
gtcctcatctttccacctgc

SEQ ID NO: 57706 - DNA, 20 bp, synthetic construct
  misc_feature 1..20: note = chemically synthesized
  source 1..20: mol_type = other DNA
cagcccctttctgcttcctc

SEQ ID NO: 57707 - DNA, 20 bp, synthetic construct
  misc_feature 1..20: note = chemically synthesized
  source 1..20: mol_type = other DNA
ctccagcacgtttttatccg

SEQ ID NO: 57708 - DNA, 20 bp, synthetic construct
  misc_feature 1..20: note = chemically synthesized
  source 1..20: mol_type = other DNA
tccagcacgtttttatccgt

SEQ ID NO: 57709 - DNA, 20 bp, synthetic construct
  misc_feature 1..20: note = chemically synthesized
  source 1..20: mol_type = other DNA
cgtttttatccgtgggaaaa

SEQ ID NO: 57710 - DNA, 20 bp, synthetic construct
  misc_feature 1..20: note = chemically synthesized
  source 1..20: mol_type = other DNA
gtttttatccgtgggaaaac

SEQ ID NO: 57711 - DNA, 20 bp, synthetic construct
  misc_feature 1..20: note = chemically synthesized
  source 1..20: mol_type = other DNA
ttatccgtgggaaaacaggt

SEQ ID NO: 57712 - DNA, 20 bp, synthetic construct
  misc_feature 1..20: note = chemically synthesized
  source 1..20: mol_type = other DNA
tatccgtgggaaaacaggtg

SEQ ID NO: 57713 - DNA, 20 bp, synthetic construct
  misc_feature 1..20: note = chemically synthesized
  source 1..20: mol_type = other DNA
tgggaaaacaggtgaggccc

SEQ ID NO: 57714 - DNA, 20 bp, synthetic construct
  misc_feature 1..20: note = chemically synthesized
  source 1..20: mol_type = other DNA
caggtgaggccccagcttgt

SEQ ID NO: 57715 - DNA, 20 bp, synthetic construct
  misc_feature 1..20: note = chemically synthesized
  source 1..20: mol_type = other DNA
tgaggccccagcttgttaga

SEQ ID NO: 57716 - DNA, 20 bp, synthetic construct
  misc_feature 1..20: note = chemically synthesized
  source 1..20: mol_type = other DNA
gttagaaagctgactgcatc

SEQ ID NO: 57717 - DNA, 20 bp, synthetic construct
  misc_feature 1..20: note = chemically synthesized
  source 1..20: mol_type = other DNA
ctgactgcatcgagacaccg

SEQ ID NO: 57718 - DNA, 20 bp, synthetic construct
  misc_feature 1..20: note = chemically synthesized
  source 1..20: mol_type = other DNA
cgagacaccgtggattctca

SEQ ID NO: 57719 - DNA, 20 bp, synthetic construct
  misc_feature 1..20: note = chemically synthesized
  source 1..20: mol_type = other DNA
gagacaccgtggattctcaa

SEQ ID NO: 57720 - DNA, 20 bp, synthetic construct
  misc_feature 1..20: note = chemically synthesized
  source 1..20: mol_type = other DNA
gtggattctcaaaggtcttg

SEQ ID NO: 57721 - DNA, 20 bp, synthetic construct
  misc_feature 1..20: note = chemically synthesized
  source 1..20: mol_type = other DNA
caaaggtcttgtggatatat

SEQ ID NO: 57722 - DNA, 20 bp, synthetic construct
  misc_feature 1..20: note = chemically synthesized
  source 1..20: mol_type = other DNA
aaaggtcttgtggatatatg

SEQ ID NO: 57723 - DNA, 20 bp, synthetic construct
  misc_feature 1..20: note = chemically synthesized
  source 1..20: mol_type = other DNA
gtcttgtggatatatgaggc

SEQ ID NO: 57724 - DNA, 20 bp, synthetic construct
  misc_feature 1..20: note = chemically synthesized
  source 1..20: mol_type = other DNA
ttgtggatatatgaggcgag

SEQ ID NO: 57725 - DNA, 20 bp, synthetic construct
  misc_feature 1..20: note = chemically synthesized
  source 1..20: mol_type = other DNA
ggatatatgaggcgagtggc

SEQ ID NO: 57726 - DNA, 20 bp, synthetic construct
  misc_feature 1..20: note = chemically synthesized
  source 1..20: mol_type = other DNA
tatatgaggcgagtggctag

SEQ ID NO: 57727 - DNA, 20 bp, synthetic construct
  misc_feature 1..20: note = chemically synthesized
  source 1..20: mol_type = other DNA
gagtggctagaagttttgct

SEQ ID NO: 57728 - DNA, 20 bp, synthetic construct
  misc_feature 1..20: note = chemically synthesized
  source 1..20: mol_type = other DNA
actcatttatctgtttattt

SEQ ID NO: 57729 - DNA, 20 bp, synthetic construct
  misc_feature 1..20: note = chemically synthesized
  source 1..20: mol_type = other DNA
atttatctgtttatttgaga

SEQ ID NO: 57730 - DNA, 20 bp, synthetic construct
  misc_feature 1..20: note = chemically synthesized
  source 1..20: mol_type = other DNA
tttatctgtttatttgagac

SEQ ID NO: 57731 - DNA, 20 bp, synthetic construct
  misc_feature 1..20: note = chemically synthesized
  source 1..20: mol_type = other DNA
ttatctgtttatttgagacg

SEQ ID NO: 57732 - DNA, 20 bp, synthetic construct
  misc_feature 1..20: note = chemically synthesized
  source 1..20: mol_type = other DNA
cggggtctcactctgttacc

SEQ ID NO: 57733 - DNA, 20 bp, synthetic construct
  misc_feature 1..20: note = chemically synthesized
  source 1..20: mol_type = other DNA
ggggtctcactctgttaccc

SEQ ID NO: 57734 - DNA, 20 bp, synthetic construct
  misc_feature 1..20: note = chemically synthesized
  source 1..20: mol_type = other DNA
tctcactctgttacccaggc

SEQ ID NO: 57735 - DNA, 20 bp, synthetic construct
  misc_feature 1..20: note = chemically synthesized
  source 1..20: mol_type = other DNA
tcactctgttacccaggctg

SEQ ID NO: 57736 - DNA, 20 bp, synthetic construct
  misc_feature 1..20: note = chemically synthesized
  source 1..20: mol_type = other DNA
ctgttacccaggctggagtg

SEQ ID NO: 57737 - DNA, 20 bp, synthetic construct
  misc_feature 1..20: note = chemically synthesized
  source 1..20: mol_type = other DNA
ttacccaggctggagtgcgg

SEQ ID NO: 57738 - DNA, 20 bp, synthetic construct
  misc_feature 1..20: note = chemically synthesized
  source 1..20: mol_type = other DNA
ggagtgcggtggcaccatca

SEQ ID NO: 57739 - DNA, 20 bp, synthetic construct
  misc_feature 1..20: note = chemically synthesized
  source 1..20: mol_type = other DNA
ggcaccatcacagctcactg

SEQ ID NO: 57740 - DNA, 20 bp, synthetic construct
  misc_feature 1..20: note = chemically synthesized
  source 1..20: mol_type = other DNA
atcacagctcactgcagcct

SEQ ID NO: 57741 - DNA, 20 bp, synthetic construct
  misc_feature 1..20: note = chemically synthesized
  source 1..20: mol_type = other DNA
tcactgcagcctcagtctcc

SEQ ID NO: 57742 - DNA, 20 bp, synthetic construct
  misc_feature 1..20: note = chemically synthesized
  source 1..20: mol_type = other DNA
cactgcagcctcagtctcct

SEQ ID NO: 57743 - DNA, 20 bp, synthetic construct
  misc_feature 1..20: note = chemically synthesized
  source 1..20: mol_type = other DNA
agcctcagtctcctgggctt

SEQ ID NO: 57744 - DNA, 20 bp, synthetic construct
  misc_feature 1..20: note = chemically synthesized
  source 1..20: mol_type = other DNA
gcctcagtctcctgggctta

SEQ ID NO: 57745 - DNA, 20 bp, synthetic construct
  misc_feature 1..20: note = chemically synthesized
  source 1..20: mol_type = other DNA
cctcagtctcctgggcttaa

SEQ ID NO: 57746 - DNA, 20 bp, synthetic construct
  misc_feature 1..20: note = chemically synthesized
  source 1..20: mol_type = other DNA
cttaagggatcgttttgcat

SEQ ID NO: 57747 - DNA, 20 bp, synthetic construct
  misc_feature 1..20: note = chemically synthesized
  source 1..20: mol_type = other DNA
gatcgttttgcatcagtctc

SEQ ID NO: 57748 - DNA, 20 bp, synthetic construct
  misc_feature 1..20: note = chemically synthesized
  source 1..20: mol_type = other DNA
atcgttttgcatcagtctct

SEQ ID NO: 57749 - DNA, 20 bp, synthetic construct
  misc_feature 1..20: note = chemically synthesized
  source 1..20: mol_type = other DNA
gttttgcatcagtctctggg

SEQ ID NO: 57750 - DNA, 20 bp, synthetic construct
  misc_feature 1..20: note = chemically synthesized
  source 1..20: mol_type = other DNA
tgcatcagtctctgggtagc

SEQ ID NO: 57751 - DNA, 20 bp, synthetic construct
  misc_feature 1..20: note = chemically synthesized
  source 1..20: mol_type = other DNA
gcatcagtctctgggtagct

SEQ ID NO: 57752 - DNA, 20 bp, synthetic construct
  misc_feature 1..20: note = chemically synthesized
  source 1..20: mol_type = other DNA
tctctgggtagctgggccta

SEQ ID NO: 57753 - DNA, 20 bp, synthetic construct
  misc_feature 1..20: note = chemically synthesized
  source 1..20: mol_type = other DNA
ctctgggtagctgggcctac

SEQ ID NO: 57754 - DNA, 20 bp, synthetic construct
  misc_feature 1..20: note = chemically synthesized
  source 1..20: mol_type = other DNA
caggcgcacaccaccaaacc

SEQ ID NO: 57755 - DNA, 20 bp, synthetic construct
  misc_feature 1..20: note = chemically synthesized
  source 1..20: mol_type = other DNA
tggtgccaccgcactccagc

SEQ ID NO: 57756 - DNA, 20 bp, synthetic construct
  misc_feature 1..20: note = chemically synthesized
  source 1..20: mol_type = other DNA
ccgcactccagcctgggtaa

SEQ ID NO: 57757 - DNA, 20 bp, synthetic construct
  misc_feature 1..20: note = chemically synthesized
  source 1..20: mol_type = other DNA
cgtctcaaataaacagataa

SEQ ID NO: 57758 - DNA, 20 bp, synthetic construct
  misc_feature 1..20: note = chemically synthesized
  source 1..20: mol_type = other DNA
tcaaataaacagataaatga

SEQ ID NO: 57759 - DNA, 20 bp, synthetic construct
  misc_feature 1..20: note = chemically synthesized
  source 1..20: mol_type = other DNA
catatatccacaagaccttt

SEQ ID NO: 57760 - DNA, 20 bp, synthetic construct
  misc_feature 1..20: note = chemically synthesized
  source 1..20: mol_type = other DNA
ggggcctcacctgttttccc

SEQ ID NO: 57761 - DNA, 20 bp, synthetic construct
  misc_feature 1..20: note = chemically synthesized
  source 1..20: mol_type = other DNA
tatgaggttgctctgatcca

SEQ ID NO: 57762 - DNA, 20 bp, synthetic construct
  misc_feature 1..20: note = chemically synthesized
  source 1..20: mol_type = other DNA
caggaagactcccactgtcc

SEQ ID NO: 57763 - DNA, 20 bp, synthetic construct
  misc_feature 1..20: note = chemically synthesized
  source 1..20: mol_type = other DNA
tcccactgtccctggatgcc

SEQ ID NO: 57764 - DNA, 20 bp, synthetic construct
  misc_feature 1..20: note = chemically synthesized
  source 1..20: mol_type = other DNA
ctgtccctggatgcccagag

SEQ ID NO: 57765 - DNA, 20 bp, synthetic construct
  misc_feature 1..20: note = chemically synthesized
  source 1..20: mol_type = other DNA
cttatcaactccttatccat

SEQ ID NO: 57766 - DNA, 20 bp, synthetic construct
  misc_feature 1..20: note = chemically synthesized
  source 1..20: mol_type = other DNA
actccacaacagaggcttat

SEQ ID NO: 57767 - DNA, 20 bp, synthetic construct
  misc_feature 1..20: note = chemically synthesized
  source 1..20: mol_type = other DNA
accatgcagtcaaggacaac

SEQ ID NO: 57768 - DNA, 20 bp, synthetic construct
  misc_feature 1..20: note = chemically synthesized
  source 1..20: mol_type = other DNA
acaactggagtcagcatggg

SEQ ID NO: 57769 - DNA, 20 bp, synthetic construct
  misc_feature 1..20: note = chemically synthesized
  source 1..20: mol_type = other DNA
ggctgggtgcgagcccttgg

SEQ ID NO: 57770 - DNA, 20 bp, synthetic construct
  misc_feature 1..20: note = chemically synthesized
  source 1..20: mol_type = other DNA
actccaggtcatacctcctg

SEQ ID NO: 57771 - DNA, 20 bp, synthetic construct
  misc_feature 1..20: note = chemically synthesized
  source 1..20: mol_type = other DNA
tgttttaatcatttccagca

SEQ ID NO: 57772 - DNA, 20 bp, synthetic construct
  misc_feature 1..20: note = chemically synthesized
  source 1..20: mol_type = other DNA
ttgccacagattcattagct

SEQ ID NO: 57773 - DNA, 20 bp, synthetic construct
  misc_feature 1..20: note = chemically synthesized
  source 1..20: mol_type = other DNA
ctcttatcctcaaaaaatgc

SEQ ID NO: 57774 - DNA, 20 bp, synthetic construct
  misc_feature 1..20: note = chemically synthesized
  source 1..20: mol_type = other DNA
gctttgctaggttgaggcgg

SEQ ID NO: 57775 - DNA, 20 bp, synthetic construct
  misc_feature 1..20: note = chemically synthesized
  source 1..20: mol_type = other DNA
cgggaggatcacttgaagcc

SEQ ID NO: 57776 - DNA, 20 bp, synthetic construct
  misc_feature 1..20: note = chemically synthesized
  source 1..20: mol_type = other DNA
agccctattttttaaaatgc

SEQ ID NO: 57777 - DNA, 20 bp, synthetic construct
  misc_feature 1..20: note = chemically synthesized
  source 1..20: mol_type = other DNA
gtcctccgtgacccaagtgt

SEQ ID NO: 57778 - DNA, 20 bp, synthetic construct
  misc_feature 1..20: note = chemically synthesized
  source 1..20: mol_type = other DNA
tcattattttgcttaaacgt

SEQ ID NO: 57779 - DNA, 20 bp, synthetic construct
  misc_feature 1..20: note = chemically synthesized
  source 1..20: mol_type = other DNA
ctggcagatctcttgagctc

SEQ ID NO: 57780 - DNA, 20 bp, synthetic construct
  misc_feature 1..20: note = chemically synthesized
  source 1..20: mol_type = other DNA
tactcaggaggctgaggtgg

SEQ ID NO: 57781 - DNA, 20 bp, synthetic construct
  misc_feature 1..20: note = chemically synthesized
  source 1..20: mol_type = other DNA
ctgcactccagcctgggaga

SEQ ID NO: 57782 - DNA, 20 bp, synthetic construct
  misc_feature 1..20: note = chemically synthesized
  source 1..20: mol_type = other DNA
tgtaactttaaggtcattaa

SEQ ID NO: 57783 - DNA, 20 bp, synthetic construct
  misc_feature 1..20: note = chemically synthesized
  source 1..20: mol_type = other DNA
catgaggccaataccaggaa

SEQ ID NO: 57784 - DNA, 20 bp, synthetic construct
  misc_feature 1..20: note = chemically synthesized
  source 1..20: mol_type = other DNA
ttttgttttgttttagagac

SEQ ID NO: 57785 - DNA, 20 bp, synthetic construct
  misc_feature 1..20: note = chemically synthesized
  source 1..20: mol_type = other DNA
aatcctcctgcctcagcctc

SEQ ID NO: 57786 - DNA, 20 bp, synthetic construct
  misc_feature 1..20: note = chemically synthesized
  source 1..20: mol_type = other DNA
tcctgaatagctgggactac

SEQ ID NO: 57787 - DNA, 20 bp, synthetic construct
  misc_feature 1..20: note = chemically synthesized
  source 1..20: mol_type = other DNA
ttaaatttttgtgtagaaac

SEQ ID NO: 57788 - DNA, 20 bp, synthetic construct
  misc_feature 1..20: note = chemically synthesized
  source 1..20: mol_type = other DNA
gtctccaactcctggcttca

SEQ ID NO: 57789 - DNA, 20 bp, synthetic construct
  misc_feature 1..20: note = chemically synthesized
  source 1..20: mol_type = other DNA
acctcagcctcccaaattgc

SEQ ID NO: 57790 - DNA, 20 bp, synthetic construct
  misc_feature 1..20: note = chemically synthesized
  source 1..20: mol_type = other DNA
taaaattaagaacttaaaac

SEQ ID NO: 57791 - DNA, 20 bp, synthetic construct
  misc_feature 1..20: note = chemically synthesized
  source 1..20: mol_type = other DNA
agaaaatctgacatctttgc

SEQ ID NO: 57792 - DNA, 20 bp, synthetic construct
  misc_feature 1..20: note = chemically synthesized
  source 1..20: mol_type = other DNA
acatctttgcaagaatcatc

SEQ ID NO: 57793 - DNA, 20 bp, synthetic construct
  misc_feature 1..20: note = chemically synthesized
  source 1..20: mol_type = other DNA
aaagttaatcattggccctg

SEQ ID NO: 57794 - DNA, 20 bp, synthetic construct
  misc_feature 1..20: note = chemically synthesized
  source 1..20: mol_type = other DNA
attttagacaaacgtggttt

SEQ ID NO: 57795 - DNA, 20 bp, synthetic construct
  misc_feature 1..20: note = chemically synthesized
  source 1..20: mol_type = other DNA
tttgagtccaaagatcaggg

SEQ ID NO: 57796 - DNA, 20 bp, synthetic construct
  misc_feature 1..20: note = chemically synthesized
  source 1..20: mol_type = other DNA
aagatcagggctgggttgac

SEQ ID NO: 57797 - DNA, 20 bp, synthetic construct
  misc_feature 1..20: note = chemically synthesized
  source 1..20: mol_type = other DNA
gggctgggttgacctgaata

SEQ ID NO: 57798 - DNA, 20 bp, synthetic construct
  misc_feature 1..20: note = chemically synthesized
  source 1..20: mol_type = other DNA
agagcaatcaccaccaagcc

SEQ ID NO: 57799 - DNA, 20 bp, synthetic construct
  misc_feature 1..20: note = chemically synthesized
  source 1..20: mol_type = other DNA
tcctgaggtgccaaggaaat

SEQ ID NO: 57800 - DNA, 20 bp, synthetic construct
  misc_feature 1..20: note = chemically synthesized
  source 1..20: mol_type = other DNA
aaggaaatgaggatggagga

SEQ ID NO: 57801 - DNA, 20 bp, synthetic construct
  misc_feature 1..20: note = chemically synthesized
  source 1..20: mol_type = other DNA
aaatgaggatggaggaagga

SEQ ID NO: 57802 - DNA, 20 bp, synthetic construct
  misc_feature 1..20: note = chemically synthesized
  source 1..20: mol_type = other DNA
atgaatgttctccatgactt

SEQ ID NO: 57803 - DNA, 20 bp, synthetic construct
  misc_feature 1..20: note = chemically synthesized
  source 1..20: mol_type = other DNA
agtcaacacattacctccag

SEQ ID NO: 57804 - DNA, 20 bp, synthetic construct
  misc_feature 1..20: note = chemically synthesized
  source 1..20: mol_type = other DNA
tgtccgtgatcgcagacctc

SEQ ID NO: 57805 - DNA, 20 bp, synthetic construct
  misc_feature 1..20: note = chemically synthesized
  source 1..20: mol_type = other DNA
gctgtgggcattaaactcct

SEQ ID NO: 57806 - DNA, 20 bp, synthetic construct
  misc_feature 1..20: note = chemically synthesized
  source 1..20: mol_type = other DNA
tccaacccctctctctgact

SEQ ID NO: 57807 - DNA, 20 bp, synthetic construct
  misc_feature 1..20: note = chemically synthesized
  source 1..20: mol_type = other DNA
agacagaaaaaatcctacca

SEQ ID NO: 57808 - DNA, 20 bp, synthetic construct
  misc_feature 1..20: note = chemically synthesized
  source 1..20: mol_type = other DNA
tacaggaaagcctatttcat

SEQ ID NO: 57809 - DNA, 20 bp, synthetic construct
  misc_feature 1..20: note = chemically synthesized
  source 1..20: mol_type = other DNA
agcctatttcatatgggtta

SEQ ID NO: 57810 - DNA, 20 bp, synthetic construct
  misc_feature 1..20: note = chemically synthesized
  source 1..20: mol_type = other DNA
tgggttaaagggtaggacag

SEQ ID NO: 57811 - DNA, 20 bp, synthetic construct
  misc_feature 1..20: note = chemically synthesized
  source 1..20: mol_type = other DNA
agttgaatttcgtgaaaagt

SEQ ID NO: 57812 - DNA, 20 bp, synthetic construct
  misc_feature 1..20: note = chemically synthesized
  source 1..20: mol_type = other DNA
agttatataggctttgagca

SEQ ID NO: 57813 - DNA, 20 bp, synthetic construct
  misc_feature 1..20: note = chemically synthesized
  source 1..20: mol_type = other DNA
actttgggaggccgaggtgg

SEQ ID NO: 57814 - DNA, 20 bp, synthetic construct
  misc_feature 1..20: note = chemically synthesized
  source 1..20: mol_type = other DNA
ccgaggtgggcgaatcactc

SEQ ID NO: 57815 - DNA, 20 bp, synthetic construct
  misc_feature 1..20: note = chemically synthesized
  source 1..20: mol_type = other DNA
aatcactcctgggtgaactc

SEQ ID NO: 57816 - DNA, 20 bp, synthetic construct
  misc_feature 1..20: note = chemically synthesized
  source 1..20: mol_type = other DNA
gagaggcggaggaggttgca

SEQ ID NO: 57817 - DNA, 20 bp, synthetic construct
  misc_feature 1..20: note = chemically synthesized
  source 1..20: mol_type = other DNA
ctgcactccagcctgggcaa

SEQ ID NO: 57818 - DNA, 20 bp, synthetic construct
  misc_feature 1..20: note = chemically synthesized
  source 1..20: mol_type = other DNA
tgattcaacagcctgttttg

SEQ ID NO: 57819 - DNA, 20 bp, synthetic construct
  misc_feature 1..20: note = chemically synthesized
  source 1..20: mol_type = other DNA
tggcaagtcatatcaattat

SEQ ID NO: 57820 - DNA, 20 bp, synthetic construct
  misc_feature 1..20: note = chemically synthesized
  source 1..20: mol_type = other DNA
tctggcagcttaataataat

SEQ ID NO: 57821 - DNA, 20 bp, synthetic construct
  misc_feature 1..20: note = chemically synthesized
  source 1..20: mol_type = other DNA
tagatgcagagaccaaggtg

SEQ ID NO: 57822 - DNA, 20 bp, synthetic construct
  misc_feature 1..20: note = chemically synthesized
  source 1..20: mol_type = other DNA
aaggttagtacatgccgagc

SEQ ID NO: 57823 - DNA, 20 bp, synthetic construct
  misc_feature 1..20: note = chemically synthesized
  source 1..20: mol_type = other DNA
ctggggagcaggggaaagcc

SEQ ID NO: 57824 - DNA, 20 bp, synthetic construct
  misc_feature 1..20: note = chemically synthesized
  source 1..20: mol_type = other DNA
ttttgtttgtttgtttgaga

SEQ ID NO: 57825 - DNA, 20 bp, synthetic construct
  misc_feature 1..20: note = chemically synthesized
  source 1..20: mol_type = other DNA
gtctcgcactgttgcctggc

SEQ ID NO: 57826 - DNA, 20 bp, synthetic construct
  misc_feature 1..20: note = chemically synthesized
  source 1..20: mol_type = other DNA
gcctcagcctcccaagtagc

SEQ ID NO: 57827 - DNA, 20 bp, synthetic construct
  misc_feature 1..20: note = chemically synthesized
  source 1..20: mol_type = other DNA
gccttggcctccctaagtgc

SEQ ID NO: 57828 - DNA, 20 bp, synthetic construct
  misc_feature 1..20: note = chemically synthesized
  source 1..20: mol_type = other DNA
tgaagaaccatgcaatctct

SEQ ID NO: 57829 - DNA, 20 bp, synthetic construct
  misc_feature 1..20: note = chemically synthesized
  source 1..20: mol_type = other DNA
ctctctgggttgatagaggc

SEQ ID NO: 57830 - DNA, 20 bp, synthetic construct
  misc_feature 1..20: note = chemically synthesized
  source 1..20: mol_type = other DNA
aaatcactattccaccatca

SEQ ID NO: 57831 - DNA, 20 bp, synthetic construct
  misc_feature 1..20: note = chemically synthesized
  source 1..20: mol_type = other DNA
atactctgtttcaaagtaga

SEQ ID NO: 57832 - DNA, 20 bp, synthetic construct
  misc_feature 1..20: note = chemically synthesized
  source 1..20: mol_type = other DNA
ggggggctcgtcctaggggc

SEQ ID NO: 57833 - DNA, 20 bp, synthetic construct
  misc_feature 1..20: note = chemically synthesized
  source 1..20: mol_type = other DNA
agtcacatagctgccatttt

SEQ ID NO: 57834 - DNA, 20 bp, synthetic construct
  misc_feature 1..20: note = chemically synthesized
  source 1..20: mol_type = other DNA
agctgccattttatggattt

SEQ ID NO: 57835 - DNA, 20 bp, synthetic construct
  misc_feature 1..20: note = chemically synthesized
  source 1..20: mol_type = other DNA
ttttttttttttttttgaga

SEQ ID NO: 57836 - DNA, 20 bp, synthetic construct
  misc_feature 1..20: note = chemically synthesized
  source 1..20: mol_type = other DNA
gattctcttgccttagcctc

SEQ ID NO: 57837 - DNA, 20 bp, synthetic construct
  misc_feature 1..20: note = chemically synthesized
  source 1..20: mol_type = other DNA
gccttagcctcccgagtagc

SEQ ID NO: 57838 - DNA, 20 bp, synthetic construct
  misc_feature 1..20: note = chemically synthesized
  source 1..20: mol_type = other DNA
tgtgagccaccgcgcctgcc

SEQ ID NO: 57839 - DNA, 20 bp, synthetic construct
  misc_feature 1..20: note = chemically synthesized
  source 1..20: mol_type = other DNA
caccgcgcctgcctggagtt

SEQ ID NO: 57840 - DNA, 20 bp, synthetic construct
  misc_feature 1..20: note = chemically synthesized
  source 1..20: mol_type = other DNA
actttgggaggctgaggtgg

SEQ ID NO: 57841 - DNA, 20 bp, synthetic construct
  misc_feature 1..20: note = chemically synthesized
  source 1..20: mol_type = other DNA
ggctgaggtgggaggattgc

SEQ ID NO: 57842 - DNA, 20 bp, synthetic construct
  misc_feature 1..20: note = chemically synthesized
  source 1..20: mol_type = other DNA
actaaaaatacaaaaactag

SEQ ID NO: 57843 - DNA, 20 bp, synthetic construct
  misc_feature 1..20: note = chemically synthesized
  source 1..20: mol_type = other DNA
tattcaggaggctgaggtgg

SEQ ID NO: 57844 - DNA, 20 bp, synthetic construct
  misc_feature 1..20: note = chemically synthesized
  source 1..20: mol_type = other DNA
ttgcgccactgcactccagg

SEQ ID NO: 57845 - DNA, 20 bp, synthetic construct
  misc_feature 1..20: note = chemically synthesized
  source 1..20: mol_type = other DNA
aaacttgttctgtttttcca

SEQ ID NO: 57846 - DNA, 20 bp, synthetic construct
  misc_feature 1..20: note = chemically synthesized
  source 1..20: mol_type = other DNA
tttggacagcgtccatactg

SEQ ID NO: 57847 - DNA, 20 bp, synthetic construct
  misc_feature 1..20: note = chemically synthesized
  source 1..20: mol_type = other DNA
agcgtccatactggtgggtt

SEQ ID NO: 57848 - DNA, 20 bp, synthetic construct
  misc_feature 1..20: note = chemically synthesized
  source 1..20: mol_type = other DNA
ccagcccctgcagacagaag

SEQ ID NO: 57849 - DNA, 20 bp, synthetic construct
  misc_feature 1..20: note = chemically synthesized
  source 1..20: mol_type = other DNA
gtggacctcgtttacctgtt

SEQ ID NO: 57850 - DNA, 20 bp, synthetic construct
  misc_feature 1..20: note = chemically synthesized
  source 1..20: mol_type = other DNA
ttcacttctgcaatactttc

SEQ ID NO: 57851 - DNA, 20 bp, synthetic construct
  misc_feature 1..20: note = chemically synthesized
  source 1..20: mol_type = other DNA
aaatctgcctattacagaac

SEQ ID NO: 57852 - DNA, 20 bp, synthetic construct
  misc_feature 1..20: note = chemically synthesized
  source 1..20: mol_type = other DNA
tgcctattacagaacctgga

SEQ ID NO: 57853 - DNA, 20 bp, synthetic construct
  misc_feature 1..20: note = chemically synthesized
  source 1..20: mol_type = other DNA
tccatgggcaaagggctcgt

SEQ ID NO: 57854 - DNA, 20 bp, synthetic construct
  misc_feature 1..20: note = chemically synthesized
  source 1..20: mol_type = other DNA
gggcagaagcctgagcttct

SEQ ID NO: 57855 - DNA, 20 bp, synthetic construct
  misc_feature 1..20: note = chemically synthesized
  source 1..20: mol_type = other DNA
cttcccaatggcctggccca

SEQ ID NO: 57856 - DNA, 20 bp, synthetic construct
  misc_feature 1..20: note = chemically synthesized
  source 1..20: mol_type = other DNA
tatacactgttctatgtgct

SEQ ID NO: 57857 - DNA, 20 bp, synthetic construct
  misc_feature 1..20: note = chemically synthesized
  source 1..20: mol_type = other DNA
tgcccttgtggagctgaaat

SEQ ID NO: 57858 - DNA, 20 bp, synthetic construct
  misc_feature 1..20: note = chemically synthesized
  source 1..20: mol_type = other DNA
taggtagatcacctgaggtc

SEQ ID NO: 57859 - DNA, 20 bp, synthetic construct
  misc_feature 1..20: note = chemically synthesized
  source 1..20: mol_type = other DNA
tacctgggaggctgaggcag

SEQ ID NO: 57860 - DNA, 20 bp, synthetic construct
  misc_feature 1..20: note = chemically synthesized
  source 1..20: mol_type = other DNA
tcggaccactgcactccagc

SEQ ID NO: 57861 - DNA, 20 bp, synthetic construct
  misc_feature 1..20: note = chemically synthesized
  source 1..20: mol_type = other DNA
aaaagtaaactattaatatg

SEQ ID NO: 57862 - DNA, 20 bp, synthetic construct
  misc_feature 1..20: note = chemically synthesized
  source 1..20: mol_type = other DNA
cagcactttgggaggctgag

SEQ ID NO: 57863 - DNA, 20 bp, synthetic construct
  misc_feature 1..20: note = chemically synthesized
  source 1..20: mol_type = other DNA
actttgggaggctgaggcgg

SEQ ID NO: 57864 - DNA, 20 bp, synthetic construct
  misc_feature 1..20: note = chemically synthesized
  source 1..20: mol_type = other DNA
cgggtggatcacctgaggtg

SEQ ID NO: 57865 - DNA, 20 bp, synthetic construct
  misc_feature 1..20: note = chemically synthesized
  source 1..20: mol_type = other DNA
actaaaaatacaaaaattag

SEQ ID NO: 57866 - DNA, 20 bp, synthetic construct
  misc_feature 1..20: note = chemically synthesized
  source 1..20: mol_type = other DNA
tactcaggaggctaaggcag

SEQ ID NO: 57867 - DNA, 20 bp, synthetic construct
  misc_feature 1..20: note = chemically synthesized
  source 1..20: mol_type = other DNA
catcataacagcttgttatc

SEQ ID NO: 57868 - DNA, 20 bp, synthetic construct
  misc_feature 1..20: note = chemically synthesized
  source 1..20: mol_type = other DNA
ataacagcttgttatcaagg

SEQ ID NO: 57869 - DNA, 20 bp, synthetic construct
  misc_feature 1..20: note = chemically synthesized
  source 1..20: mol_type = other DNA
tattatctctgctccttagg

SEQ ID NO: 57870 - DNA, 20 bp, synthetic construct
  misc_feature 1..20: note = chemically synthesized
  source 1..20: mol_type = other DNA
actttgggaggccaacgcag

SEQ ID NO: 57871 - DNA, 20 bp, synthetic construct
  misc_feature 1..20: note = chemically synthesized
  source 1..20: mol_type = other DNA
caggtggatcacctgaggtc

SEQ ID NO: 57872 - DNA, 20 bp, synthetic construct
  misc_feature 1..20: note = chemically synthesized
  source 1..20: mol_type = other DNA
tacccaggaggctgcggcag

SEQ ID NO: 57873 - DNA, 20 bp, synthetic construct
  misc_feature 1..20: note = chemically synthesized
  source 1..20: mol_type = other DNA
aaaaaaaaaaaaaagtttaa

SEQ ID NO: 57874 - DNA, 20 bp, synthetic construct
  misc_feature 1..20: note = chemically synthesized
  source 1..20: mol_type = other DNA
agaaagcctttatttatcta

SEQ ID NO: 57875 - DNA, 20 bp, synthetic construct
  misc_feature 1..20: note = chemically synthesized
  source 1..20: mol_type = other DNA
tgaaatggagattcacgtgc

SEQ ID NO: 57876 - DNA, 20 bp, synthetic construct
  misc_feature 1..20: note = chemically synthesized
  source 1..20: mol_type = other DNA
ccacagcgagctctgaagct

SEQ ID NO: 57877 - DNA, 20 bp, synthetic construct
  misc_feature 1..20: note = chemically synthesized
  source 1..20: mol_type = other DNA
tgaagctggggatggctcct

SEQ ID NO: 57878 - DNA, 20 bp, synthetic construct
  misc_feature 1..20: note = chemically synthesized
  source 1..20: mol_type = other DNA
gttggtccaagttgggacaa

SEQ ID NO: 57879 - DNA, 20 bp, synthetic construct
  misc_feature 1..20: note = chemically synthesized
  source 1..20: mol_type = other DNA
tctcaggaccctctatctct

SEQ ID NO: 57880 - DNA, 20 bp, synthetic construct
  misc_feature 1..20: note = chemically synthesized
  source 1..20: mol_type = other DNA
ccctctatctctcagggtag

SEQ ID NO: 57881 - DNA, 20 bp, synthetic construct
  misc_feature 1..20: note = chemically synthesized
  source 1..20: mol_type = other DNA
tctctcagggtagaggaatt

SEQ ID NO: 57882 - DNA, 20 bp, synthetic construct
  misc_feature 1..20: note = chemically synthesized
  source 1..20: mol_type = other DNA
cagggtagaggaattaagaa

SEQ ID NO: 57883 - DNA, 20 bp, synthetic construct
  misc_feature 1..20: note = chemically synthesized
  source 1..20: mol_type = other DNA
tcccaacactttgggaggcc

SEQ ID NO: 57884 - DNA, 20 bp, synthetic construct
  misc_feature 1..20: note = chemically synthesized
  source 1..20: mol_type = other DNA
ctttgggaggccaagggtag

SEQ ID NO: 57885 - DNA, 20 bp, synthetic construct
  misc_feature 1..20: note = chemically synthesized
  source 1..20: mol_type = other DNA
taggaggattgcttgagccc

SEQ ID NO: 57886 - DNA, 20 bp, synthetic construct
  misc_feature 1..20: note = chemically synthesized
  source 1..20: mol_type = other DNA
tactcagggggctgaggtgg

SEQ ID NO: 57887 - DNA, 20 bp, synthetic construct
  misc_feature 1..20: note = chemically synthesized
  source 1..20: mol_type = other DNA
ggctgaggtgggaggattgc

SEQ ID NO: 57888 - DNA, 20 bp, synthetic construct
  misc_feature 1..20: note = chemically synthesized
  source 1..20: mol_type = other DNA
aaaacggaaccggttgcaag

SEQ ID NO: 57889 - DNA, 20 bp, synthetic construct
  misc_feature 1..20: note = chemically synthesized
  source 1..20: mol_type = other DNA
gcagggttaaatagcgtggt

SEQ ID NO: 57890 - DNA, 20 bp, synthetic construct
  misc_feature 1..20: note = chemically synthesized
  source 1..20: mol_type = other DNA
tggtcagagtaggactcact

SEQ ID NO: 57891 - DNA, 20 bp, synthetic construct
  misc_feature 1..20: note = chemically synthesized
  source 1..20: mol_type = other DNA
actcactgagaatatgagat

SEQ ID NO: 57892 - DNA, 20 bp, synthetic construct
  misc_feature 1..20: note = chemically synthesized
  source 1..20: mol_type = other DNA
gagatctgagtcaagtcttc

SEQ ID NO: 57893 - DNA, 20 bp, synthetic construct
  misc_feature 1..20: note = chemically synthesized
  source 1..20: mol_type = other DNA
tgaggccagtgtagccagaa

SEQ ID NO: 57894 - DNA, 20 bp, synthetic construct
  misc_feature 1..20: note = chemically synthesized
  source 1..20: mol_type = other DNA
gatggaaatttgttaaataa

SEQ ID NO: 57895 - DNA, 20 bp, synthetic construct
  misc_feature 1..20: note = chemically synthesized
  source 1..20: mol_type = other DNA
atttgttaaataaatgaatt

SEQ ID NO: 57896 - DNA, 20 bp, synthetic construct
  misc_feature 1..20: note = chemically synthesized
  source 1..20: mol_type = other DNA
aaataaatgaattatggata

SEQ ID NO: 57897 - DNA, 20 bp, synthetic construct
  misc_feature 1..20: note = chemically synthesized
  source 1..20: mol_type = other DNA
aaatgaattatggataacga

SEQ ID NO: 57898 - DNA, 20 bp, synthetic construct
  misc_feature 1..20: note = chemically synthesized
  source 1..20: mol_type = other DNA
gataacgaatggatggtaag

SEQ ID NO: 57899 - DNA, 20 bp, synthetic construct
  misc_feature 1..20: note = chemically synthesized
  source 1..20: mol_type = other DNA
acgaatggatggtaagatgg

SEQ ID NO: 57900 - DNA, 20 bp, synthetic construct
  misc_feature 1..20: note = chemically synthesized
  source 1..20: mol_type = other DNA
atggatggtaagatgggtgg

SEQ ID NO: 57901 - DNA, 20 bp, synthetic construct
  misc_feature 1..20: note = chemically synthesized
  source 1..20: mol_type = other DNA
gtaagatgggtggatggatg

SEQ ID NO: 57902 - DNA, 20 bp, synthetic construct
  misc_feature 1..20: note = chemically synthesized
  source 1..20: mol_type = other DNA
ggtggatggatggggggtga

SEQ ID NO: 57903 - DNA, 20 bp, synthetic construct
  misc_feature 1..20: note = chemically synthesized
  source 1..20: mol_type = other DNA
gatggatggggggtgaacgg

SEQ ID NO: 57904 - DNA, 20 bp, synthetic construct
  misc_feature 1..20: note = chemically synthesized
  source 1..20: mol_type = other DNA
ggggggtgaacggatggatg

SEQ ID NO: 57905 - DNA, 20 bp, synthetic construct
  misc_feature 1..20: note = chemically synthesized
  source 1..20: mol_type = other DNA
ggtgaacggatggatggggg

SEQ ID NO: 57906 - DNA, 20 bp, synthetic construct
  misc_feature 1..20: note = chemically synthesized
  source 1..20: mol_type = other DNA
aacggatggatggggggtga

SEQ ID NO: 57907 - DNA, 20 bp, synthetic construct
  misc_feature 1..20: note = chemically synthesized
  source 1..20: mol_type = other DNA
gatggatggggggtgaatgg

SEQ ID NO: 57908 - DNA, 20 bp, synthetic construct
  misc_feature 1..20: note = chemically synthesized
  source 1..20: mol_type = other DNA
gatggggggtgaatggatgg

SEQ ID NO: 57909 - DNA, 20 bp, synthetic construct
  misc_feature 1..20: note = chemically synthesized
  source 1..20: mol_type = other DNA
gggggtgaatggatggatga

SEQ ID NO: 57910 - DNA, 20 bp, synthetic construct
  misc_feature 1..20: note = chemically synthesized
  source 1..20: mol_type = other DNA
atggatggatgaatgggtag

SEQ ID NO: 57911 - DNA, 20 bp, synthetic construct
  misc_feature 1..20: note = chemically synthesized
  source 1..20: mol_type = other DNA
atggatgaatgggtagatgg

SEQ ID NO: 57912 - DNA, 20 bp, synthetic construct
  misc_feature 1..20: note = chemically synthesized
  source 1..20: mol_type = other DNA
atgggtagatgggtggatag

SEQ ID NO: 57913 - DNA, 20 bp, synthetic construct
  misc_feature 1..20: note = chemically synthesized
  source 1..20: mol_type = other DNA
atgggtggatagggggatgg

SEQ ID NO: 57914 - DNA, 20 bp, synthetic construct
  misc_feature 1..20: note = chemically synthesized
  source 1..20: mol_type = other DNA
atagggggatggctgggtgg

SEQ ID NO: 57915 - DNA, 20 bp, synthetic construct
  misc_feature 1..20: note = chemically synthesized
  source 1..20: mol_type = other DNA
tttcggtaagaactcaccac

SEQ ID NO: 57916 - DNA, 20 bp, synthetic construct
  misc_feature 1..20: note = chemically synthesized
  source 1..20: mol_type = other DNA
cacctgggcagccgctgatt

SEQ ID NO: 57917 - DNA, 20 bp, synthetic construct
  misc_feature 1..20: note = chemically synthesized
  source 1..20: mol_type = other DNA
tgattaagagttgtggcact

SEQ ID NO: 57918 - DNA, 20 bp, synthetic construct
  misc_feature 1..20: note = chemically synthesized
  source 1..20: mol_type = other DNA
agagttgtggcactttggat

SEQ ID NO: 57919 - DNA, 20 bp, synthetic construct
  misc_feature 1..20: note = chemically synthesized
  source 1..20: mol_type = other DNA
ctttggatagggataaacct

SEQ ID NO: 57920 - DNA, 20 bp, synthetic construct
  misc_feature 1..20: note = chemically synthesized
  source 1..20: mol_type = other DNA
agggataaacctcagagtca

SEQ ID NO: 57921 - DNA, 20 bp, synthetic construct
  misc_feature 1..20: note = chemically synthesized
  source 1..20: mol_type = other DNA
cagggaatgtttgggctgaa

SEQ ID NO: 57922 - DNA, 20 bp, synthetic construct
  misc_feature 1..20: note = chemically synthesized
  source 1..20: mol_type = other DNA
acccatgtctgtaccaacca

SEQ ID NO: 57923 - DNA, 20 bp, synthetic construct
  misc_feature 1..20: note = chemically synthesized
  source 1..20: mol_type = other DNA
cagaagatattcctactaca

SEQ ID NO: 57924 - DNA, 20 bp, synthetic construct
  misc_feature 1..20: note = chemically synthesized
  source 1..20: mol_type = other DNA
tattcctactacagagaatt

SEQ ID NO: 57925 - DNA, 20 bp, synthetic construct
  misc_feature 1..20: note = chemically synthesized
  source 1..20: mol_type = other DNA
gatcctcccacctcagccat

SEQ ID NO: 57926 - DNA, 20 bp, synthetic construct
  misc_feature 1..20: note = chemically synthesized
  source 1..20: mol_type = other DNA
ctcgtatctttttgtagaga

SEQ ID NO: 57927 - DNA, 20 bp, synthetic construct
  misc_feature 1..20: note = chemically synthesized
  source 1..20: mol_type = other DNA
gcctcagcctcctaaaatat

SEQ ID NO: 57928 - DNA, 20 bp, synthetic construct
  misc_feature 1..20: note = chemically synthesized
  source 1..20: mol_type = other DNA
aagttaaaattcatatacac

SEQ ID NO: 57929 - DNA, 20 bp, synthetic construct
  misc_feature 1..20: note = chemically synthesized
  source 1..20: mol_type = other DNA
ttttttttttttttttgaga

SEQ ID NO: 57930 - DNA, 20 bp, synthetic construct
  misc_feature 1..20: note = chemically synthesized
  source 1..20: mol_type = other DNA
tctcgctctgttgcccaggc

SEQ ID NO: 57931 - DNA, 20 bp, synthetic construct
  misc_feature 1..20: note = chemically synthesized
  source 1..20: mol_type = other DNA
ctcactgcaacctccgcttc

SEQ ID NO: 57932 - DNA, 20 bp, synthetic construct
  misc_feature 1..20: note = chemically synthesized
  source 1..20: mol_type = other DNA
tattcttctgcctcagccta

SEQ ID NO: 57933 - DNA, 20 bp, synthetic construct
  misc_feature 1..20: note = chemically synthesized
  source 1..20: mol_type = other DNA
ttttttatttttagtagaga

SEQ ID NO: 57934 - DNA, 20 bp, synthetic construct
  misc_feature 1..20: note = chemically synthesized
  source 1..20: mol_type = other DNA
gcctcagcctcccaaagtgc

SEQ ID NO: 57935 - DNA, 20 bp, synthetic construct
  misc_feature 1..20: note = chemically synthesized
  source 1..20: mol_type = other DNA
ttttttttttttttttgaga

SEQ ID NO: 57936 - DNA, 20 bp, synthetic construct
  misc_feature 1..20: note = chemically synthesized
  source 1..20: mol_type = other DNA
tttgctcttgttgcccaggc

SEQ ID NO: 57937 - DNA, 20 bp, synthetic construct
  misc_feature 1..20: note = chemically synthesized
  source 1..20: mol_type = other DNA
ctcactgtaacctccacctc

SEQ ID NO: 57938 - DNA, 20 bp, synthetic construct
  misc_feature 1..20: note = chemically synthesized
  source 1..20: mol_type = other DNA
gcctcagcctctcaaatagc

SEQ ID NO: 57939 - DNA, 20 bp, synthetic construct
  misc_feature 1..20: note = chemically synthesized
  source 1..20: mol_type = other DNA
aattttttttttagtagaga

SEQ ID NO: 57940 - DNA, 20 bp, synthetic construct
  misc_feature 1..20: note = chemically synthesized
  source 1..20: mol_type = other DNA
acctcggcctcccaaagtgc

SEQ ID NO: 57941 - DNA, 20 bp, synthetic construct
  misc_feature 1..20: note = chemically synthesized
  source 1..20: mol_type = other DNA
ttgatcttttttaaagagac

SEQ ID NO: 57942 - DNA, 20 bp, synthetic construct
  misc_feature 1..20: note = chemically synthesized
  source 1..20: mol_type = other DNA
acctcggcctcccaaagtat

SEQ ID NO: 57943 - DNA, 20 bp, synthetic construct
  misc_feature 1..20: note = chemically synthesized
  source 1..20: mol_type = other DNA
caacaggcatctttggactt

SEQ ID NO: 57944 - DNA, 20 bp, synthetic construct
  misc_feature 1..20: note = chemically synthesized
  source 1..20: mol_type = other DNA
aggggctgttttctttgctg

SEQ ID NO: 57945 - DNA, 20 bp, synthetic construct
  misc_feature 1..20: note = chemically synthesized
  source 1..20: mol_type = other DNA
gcctcttctgttgcaggtgc

SEQ ID NO: 57946 - DNA, 20 bp, synthetic construct
  misc_feature 1..20: note = chemically synthesized
  source 1..20: mol_type = other DNA
cttgaatgtcattttgtggt

SEQ ID NO: 57947 - DNA, 20 bp, synthetic construct
  misc_feature 1..20: note = chemically synthesized
  source 1..20: mol_type = other DNA
tgggattctgggctgtgcag

SEQ ID NO: 57948 - DNA, 20 bp, synthetic construct
  misc_feature 1..20: note = chemically synthesized
  source 1..20: mol_type = other DNA
cagctgaatgtctgtctgtc

SEQ ID NO: 57949 - DNA, 20 bp, synthetic construct
  misc_feature 1..20: note = chemically synthesized
  source 1..20: mol_type = other DNA
tttcctcatcaagttgttgc

SEQ ID NO: 57950 - DNA, 20 bp, synthetic construct
  misc_feature 1..20: note = chemically synthesized
  source 1..20: mol_type = other DNA
tcagtactgttagcatttct

SEQ ID NO: 57951 - DNA, 20 bp, synthetic construct
  misc_feature 1..20: note = chemically synthesized
  source 1..20: mol_type = other DNA
atttctgtgggttgaaagtc

SEQ ID NO: 57952 - DNA, 20 bp, synthetic construct
  misc_feature 1..20: note = chemically synthesized
  source 1..20: mol_type = other DNA
ttgaaatgattaatttctat

SEQ ID NO: 57953 - DNA, 20 bp, synthetic construct
  misc_feature 1..20: note = chemically synthesized
  source 1..20: mol_type = other DNA
tataagagtgcccagatcta

SEQ ID NO: 57954 - DNA, 20 bp, synthetic construct
  misc_feature 1..20: note = chemically synthesized
  source 1..20: mol_type = other DNA
agagtgcccagatctataga

SEQ ID NO: 57955 - DNA, 20 bp, synthetic construct
  misc_feature 1..20: note = chemically synthesized
  source 1..20: mol_type = other DNA
catcaaattaacgcaccaaa

SEQ ID NO: 57956 - DNA, 20 bp, synthetic construct
  misc_feature 1..20: note = chemically synthesized
  source 1..20: mol_type = other DNA
aggccctaatttacttttca

SEQ ID NO: 57957 - DNA, 20 bp, synthetic construct
  misc_feature 1..20: note = chemically synthesized
  source 1..20: mol_type = other DNA
gttgatctcttttataggtt

SEQ ID NO: 57958 - DNA, 20 bp, synthetic construct
  misc_feature 1..20: note = chemically synthesized
  source 1..20: mol_type = other DNA
tcttttataggttcagagtt

SEQ ID NO: 57959 - DNA, 20 bp, synthetic construct
  misc_feature 1..20: note = chemically synthesized
  source 1..20: mol_type = other DNA
tttgttttttttttttgaga

SEQ ID NO: 57960 - DNA, 20 bp, synthetic construct
  misc_feature 1..20: note = chemically synthesized
  source 1..20: mol_type = other DNA
tctcgctctgtgacccaggc

SEQ ID NO: 57961 - DNA, 20 bp, synthetic construct
  misc_feature 1..20: note = chemically synthesized
  source 1..20: mol_type = other DNA
ctcactgcaagctccacctc

SEQ ID NO: 57962 - DNA, 20 bp, synthetic construct
  misc_feature 1..20: note = chemically synthesized
  source 1..20: mol_type = other DNA
attctcctgcctcagcctct

SEQ ID NO: 57963 - DNA, 20 bp, synthetic construct
  misc_feature 1..20: note = chemically synthesized
  source 1..20: mol_type = other DNA
ttttgtatttttagcagaga

SEQ ID NO: 57964 - DNA, 20 bp, synthetic construct
  misc_feature 1..20: note = chemically synthesized
  source 1..20: mol_type = other DNA
gcctcggcctcccaaagcgc

SEQ ID NO: 57965 - DNA, 20 bp, synthetic construct
  misc_feature 1..20: note = chemically synthesized
  source 1..20: mol_type = other DNA
tcccaaagcgctgggattac

SEQ ID NO: 57966 - DNA, 20 bp, synthetic construct
  misc_feature 1..20: note = chemically synthesized
  source 1..20: mol_type = other DNA
ggtgagccaccgcaccctgc

SEQ ID NO: 57967 - DNA, 20 bp, synthetic construct
  misc_feature 1..20: note = chemically synthesized
  source 1..20: mol_type = other DNA
ttttcttagatccaattaac

SEQ ID NO: 57968 - DNA, 20 bp, synthetic construct
  misc_feature 1..20: note = chemically synthesized
  source 1..20: mol_type = other DNA
aaagattttgtgggaggcac

SEQ ID NO: 57969 - DNA, 20 bp, synthetic construct
  misc_feature 1..20: note = chemically synthesized
  source 1..20: mol_type = other DNA
ataagaccttaacaaaactg

SEQ ID NO: 57970 - DNA, 20 bp, synthetic construct
  misc_feature 1..20: note = chemically synthesized
  source 1..20: mol_type = other DNA
gaacatagcagcattcaaag

SEQ ID NO: 57971 - DNA, 20 bp, synthetic construct
  misc_feature 1..20: note = chemically synthesized
  source 1..20: mol_type = other DNA
aagtaacacagcatttagta

SEQ ID NO: 57972 - DNA, 20 bp, synthetic construct
  misc_feature 1..20: note = chemically synthesized
  source 1..20: mol_type = other DNA
ccatatcacatgaaaaacct

SEQ ID NO: 57973 - DNA, 20 bp, synthetic construct
  misc_feature 1..20: note = chemically synthesized
  source 1..20: mol_type = other DNA
ctgggaatgtttaggttaga

SEQ ID NO: 57974 - DNA, 20 bp, synthetic construct
  misc_feature 1..20: note = chemically synthesized
  source 1..20: mol_type = other DNA
ataaaatggactgttatagt

SEQ ID NO: 57975 - DNA, 20 bp, synthetic construct
  misc_feature 1..20: note = chemically synthesized
  source 1..20: mol_type = other DNA
ggggtgagctccctacctct

SEQ ID NO: 57976 - DNA, 20 bp, synthetic construct
  misc_feature 1..20: note = chemically synthesized
  source 1..20: mol_type = other DNA
gatatggcacctccatctga

SEQ ID NO: 57977 - DNA, 20 bp, synthetic construct
  misc_feature 1..20: note = chemically synthesized
  source 1..20: mol_type = other DNA
agtctatattgagggcaggc

SEQ ID NO: 57978 - DNA, 20 bp, synthetic construct
  misc_feature 1..20: note = chemically synthesized
  source 1..20: mol_type = other DNA
ggcaggctggagtcacacat

SEQ ID NO: 57979 - DNA, 20 bp, synthetic construct
  misc_feature 1..20: note = chemically synthesized
  source 1..20: mol_type = other DNA
tttaattccacagtcgcaga

SEQ ID NO: 57980 - DNA, 20 bp, synthetic construct
  misc_feature 1..20: note = chemically synthesized
  source 1..20: mol_type = other DNA
cttcctgttcagcttcgcca

SEQ ID NO: 57981 - DNA, 20 bp, synthetic construct
  misc_feature 1..20: note = chemically synthesized
  source 1..20: mol_type = other DNA
tttatctgctgctcaaggga

SEQ ID NO: 57982 - DNA, 20 bp, synthetic construct
  misc_feature 1..20: note = chemically synthesized
  source 1..20: mol_type = other DNA
ccagaggtggtgcgagcagc

SEQ ID NO: 57983 - DNA, 20 bp, synthetic construct
  misc_feature 1..20: note = chemically synthesized
  source 1..20: mol_type = other DNA
aggtggtgcgagcagccaga

SEQ ID NO: 57984 - DNA, 20 bp, synthetic construct
  misc_feature 1..20: note = chemically synthesized
  source 1..20: mol_type = other DNA
tctacgtcttgtccttctgc

SEQ ID NO: 57985 - DNA, 20 bp, synthetic construct
  misc_feature 1..20: note = chemically synthesized
  source 1..20: mol_type = other DNA
agaagtcgttgtaagagatg

SEQ ID NO: 57986 - DNA, 20 bp, synthetic construct
  misc_feature 1..20: note = chemically synthesized
  source 1..20: mol_type = other DNA
ttaaagtcaacaaccatgcc

SEQ ID NO: 57987 - DNA, 20 bp, synthetic construct
  misc_feature 1..20: note = chemically synthesized
  source 1..20: mol_type = other DNA
tgccatccattctgccgtcg

SEQ ID NO: 57988 - DNA, 20 bp, synthetic construct
  misc_feature 1..20: note = chemically synthesized
  source 1..20: mol_type = other DNA
tgccgtcgtggaattaaatc

SEQ ID NO: 57989 - DNA, 20 bp, synthetic construct
  misc_feature 1..20: note = chemically synthesized
  source 1..20: mol_type = other DNA
aaatcacggatggcagattg

SEQ ID NO: 57990 - DNA, 20 bp, synthetic construct
  misc_feature 1..20: note = chemically synthesized
  source 1..20: mol_type = other DNA
ggaggtcctcctctctctac

SEQ ID NO: 57991 - DNA, 20 bp, synthetic construct
  misc_feature 1..20: note = chemically synthesized
  source 1..20: mol_type = other DNA
tggaacagcccattttatct

SEQ ID NO: 57992 - DNA, 20 bp, synthetic construct
  misc_feature 1..20: note = chemically synthesized
  source 1..20: mol_type = other DNA
cttttacaatcctaatcata

SEQ ID NO: 57993 - DNA, 20 bp, synthetic construct
  misc_feature 1..20: note = chemically synthesized
  source 1..20: mol_type = other DNA
gaaagacctgttgctagaag

SEQ ID NO: 57994 - DNA, 20 bp, synthetic construct
  misc_feature 1..20: note = chemically synthesized
  source 1..20: mol_type = other DNA
ttgctagaagttgggttgtt

SEQ ID NO: 57995 - DNA, 20 bp, synthetic construct
  misc_feature 1..20: note = chemically synthesized
  source 1..20: mol_type = other DNA
ccaggctggagatcctaact

SEQ ID NO: 57996 - DNA, 20 bp, synthetic construct
  misc_feature 1..20: note = chemically synthesized
  source 1..20: mol_type = other DNA
gagaaaaggagaaaggagct

SEQ ID NO: 57997 - DNA, 20 bp, synthetic construct
  misc_feature 1..20: note = chemically synthesized
  source 1..20: mol_type = other DNA
gaaaagaaggctgcctaagg

SEQ ID NO: 57998 - DNA, 20 bp, synthetic construct
  misc_feature 1..20: note = chemically synthesized
  source 1..20: mol_type = other DNA
tataattaatagatggttag

SEQ ID NO: 57999 - DNA, 20 bp, synthetic construct
  misc_feature 1..20: note = chemically synthesized
  source 1..20: mol_type = other DNA
tacatgttcatcgtatttcc

SEQ ID NO: 58000 - DNA, 20 bp, synthetic construct
  misc_feature 1..20: note = chemically synthesized
  source 1..20: mol_type = other DNA
catcgtatttccttggattt

SEQ ID NO: 58001 - DNA, 20 bp, synthetic construct
  misc_feature 1..20: note = chemically synthesized
  source 1..20: mol_type = other DNA
ctggctccacatccacccca

SEQ ID NO: 58002 - DNA, 20 bp, synthetic construct
  misc_feature 1..20: note = chemically synthesized
  source 1..20: mol_type = other DNA
caaaatgacaaggggagggc

SEQ ID NO: 58003 - DNA, 20 bp, synthetic construct
  misc_feature 1..20: note = chemically synthesized
  source 1..20: mol_type = other DNA
agtgttacttttaattccta

SEQ ID NO: 58004 - DNA, 20 bp, synthetic construct
  misc_feature 1..20: note = chemically synthesized
  source 1..20: mol_type = other DNA
ctttttttttttttttgaga

SEQ ID NO: 58005 - DNA, 20 bp, synthetic construct
  misc_feature 1..20: note = chemically synthesized
  source 1..20: mol_type = other DNA
ctatgttgcccaggctgctc

SEQ ID NO: 58006 - DNA, 20 bp, synthetic construct
  misc_feature 1..20: note = chemically synthesized
  source 1..20: mol_type = other DNA
ggcgcacctatcacccaggc

SEQ ID NO: 58007 - DNA, 20 bp, synthetic construct
  misc_feature 1..20: note = chemically synthesized
  source 1..20: mol_type = other DNA
acctatcacccaggctggag

SEQ ID NO: 58008 - DNA, 20 bp, synthetic construct
  misc_feature 1..20: note = chemically synthesized
  source 1..20: mol_type = other DNA
caggctaatttttatatttt

SEQ ID NO: 58009 - DNA, 20 bp, synthetic construct
  misc_feature 1..20: note = chemically synthesized
  source 1..20: mol_type = other DNA
ttttagaattttagaagaga

SEQ ID NO: 58010 - DNA, 20 bp, synthetic construct
  misc_feature 1..20: note = chemically synthesized
  source 1..20: mol_type = other DNA
gccttggcctcccaaggtgc

SEQ ID NO: 58011 - DNA, 20 bp, synthetic construct
  misc_feature 1..20: note = chemically synthesized
  source 1..20: mol_type = other DNA
tttcaatctcatctgatatg

SEQ ID NO: 58012 - DNA, 20 bp, synthetic construct
  misc_feature 1..20: note = chemically synthesized
  source 1..20: mol_type = other DNA
attaaagcaacattttattt

SEQ ID NO: 58013 - DNA, 20 bp, synthetic construct
  misc_feature 1..20: note = chemically synthesized
  source 1..20: mol_type = other DNA
gagaagaaaagtgctctctc

SEQ ID NO: 58014 - DNA, 20 bp, synthetic construct
  misc_feature 1..20: note = chemically synthesized
  source 1..20: mol_type = other DNA
tgctctctcttgagttgacc

SEQ ID NO: 58015 - DNA, 20 bp, synthetic construct
  misc_feature 1..20: note = chemically synthesized
  source 1..20: mol_type = other DNA
agttgaccgagagtcccatt

SEQ ID NO: 58016 - DNA, 20 bp, synthetic construct
  misc_feature 1..20: note = chemically synthesized
  source 1..20: mol_type = other DNA
tgcatccacaggggcacagg

SEQ ID NO: 58017 - DNA, 20 bp, synthetic construct
  misc_feature 1..20: note = chemically synthesized
  source 1..20: mol_type = other DNA
agcatagaaccagaaagatt

SEQ ID NO: 58018 - DNA, 20 bp, synthetic construct
  misc_feature 1..20: note = chemically synthesized
  source 1..20: mol_type = other DNA
agaaagattcagagttggcc

SEQ ID NO: 58019 - DNA, 20 bp, synthetic construct
  misc_feature 1..20: note = chemically synthesized
  source 1..20: mol_type = other DNA
ctaccagaccacaagtcagc

SEQ ID NO: 58020 - DNA, 20 bp, synthetic construct
  misc_feature 1..20: note = chemically synthesized
  source 1..20: mol_type = other DNA
atggcatcaaattgcaactt

SEQ ID NO: 58021 - DNA, 20 bp, synthetic construct
  misc_feature 1..20: note = chemically synthesized
  source 1..20: mol_type = other DNA
gcaacttgagagtagatggg

SEQ ID NO: 58022 - DNA, 20 bp, synthetic construct
  misc_feature 1..20: note = chemically synthesized
  source 1..20: mol_type = other DNA
caacaagactaggccagctc

SEQ ID NO: 58023 - DNA, 20 bp, synthetic construct
  misc_feature 1..20: note = chemically synthesized
  source 1..20: mol_type = other DNA
aactcagtgtcagcaaggtt

SEQ ID NO: 58024 - DNA, 20 bp, synthetic construct
  misc_feature 1..20: note = chemically synthesized
  source 1..20: mol_type = other DNA
cagagccagtcacagcacca

SEQ ID NO: 58025 - DNA, 20 bp, synthetic construct
  misc_feature 1..20: note = chemically synthesized
  source 1..20: mol_type = other DNA
gctaagagatttatttcatc

SEQ ID NO: 58026 - DNA, 20 bp, synthetic construct
  misc_feature 1..20: note = chemically synthesized
  source 1..20: mol_type = other DNA
gatttatttcatcctgggtg

SEQ ID NO: 58027 - DNA, 20 bp, synthetic construct
  misc_feature 1..20: note = chemically synthesized
  source 1..20: mol_type = other DNA
ctcaaatcatcaccgtatca

SEQ ID NO: 58028 - DNA, 20 bp, synthetic construct
  misc_feature 1..20: note = chemically synthesized
  source 1..20: mol_type = other DNA
accgtatcaatggatttcct

SEQ ID NO: 58029 - DNA, 20 bp, synthetic construct
  misc_feature 1..20: note = chemically synthesized
  source 1..20: mol_type = other DNA
gctatttcacacctgaactc

SEQ ID NO: 58030 - DNA, 20 bp, synthetic construct
  misc_feature 1..20: note = chemically synthesized
  source 1..20: mol_type = other DNA
gggaagattgcattctccta

SEQ ID NO: 58031 - DNA, 20 bp, synthetic construct
  misc_feature 1..20: note = chemically synthesized
  source 1..20: mol_type = other DNA
tgtgggaaccaggcccctca

SEQ ID NO: 58032 - DNA, 20 bp, synthetic construct
  misc_feature 1..20: note = chemically synthesized
  source 1..20: mol_type = other DNA
tttttttttttaatagagat

SEQ ID NO: 58033 - DNA, 20 bp, synthetic construct
  misc_feature 1..20: note = chemically synthesized
  source 1..20: mol_type = other DNA
cccaggctggtcttgaactc

SEQ ID NO: 58034 - DNA, 20 bp, synthetic construct
  misc_feature 1..20: note = chemically synthesized
  source 1..20: mol_type = other DNA
gcctcagcctcccaaagtgc

SEQ ID NO: 58035 - DNA, 20 bp, synthetic construct
  misc_feature 1..20: note = chemically synthesized
  source 1..20: mol_type = other DNA
aacataacagataaagttta

SEQ ID NO: 58036 - DNA, 20 bp, synthetic construct
  misc_feature 1..20: note = chemically synthesized
  source 1..20: mol_type = other DNA
ttagttctcccaacatctct

SEQ ID NO: 58037 - DNA, 20 bp, synthetic construct
  misc_feature 1..20: note = chemically synthesized
  source 1..20: mol_type = other DNA
tatattacaaataggtccag

SEQ ID NO: 58038 - DNA, 20 bp, synthetic construct
  misc_feature 1..20: note = chemically synthesized
  source 1..20: mol_type = other DNA
gaggggttagtcatcttgtc

SEQ ID NO: 58039 - DNA, 20 bp, synthetic construct
  misc_feature 1..20: note = chemically synthesized
  source 1..20: mol_type = other DNA
cagaatggtggaaccaggtt

SEQ ID NO: 58040 - DNA, 20 bp, synthetic construct
  misc_feature 1..20: note = chemically synthesized
  source 1..20: mol_type = other DNA
gtggcagattgcctgagctc

SEQ ID NO: 58041 - DNA, 20 bp, synthetic construct
  misc_feature 1..20: note = chemically synthesized
  source 1..20: mol_type = other DNA
tactcaggtggctgaggtgg

SEQ ID NO: 58042 - DNA, 20 bp, synthetic construct
  misc_feature 1..20: note = chemically synthesized
  source 1..20: mol_type = other DNA
ttatgccactgcactccagc

SEQ ID NO: 58043 - DNA, 20 bp, synthetic construct
  misc_feature 1..20: note = chemically synthesized
  source 1..20: mol_type = other DNA
ctgcactccagcctgggtga

SEQ ID NO: 58044 - DNA, 20 bp, synthetic construct
  misc_feature 1..20: note = chemically synthesized
  source 1..20: mol_type = other DNA
aaagaagcaagcagtctggg

SEQ ID NO: 58045 - DNA, 20 bp, synthetic construct
  misc_feature 1..20: note = chemically synthesized
  source 1..20: mol_type = other DNA
catgttatggcataatttgg

SEQ ID NO: 58046 - DNA, 20 bp, synthetic construct
  misc_feature 1..20: note = chemically synthesized
  source 1..20: mol_type = other DNA
agttttcaggtggtaggctt

SEQ ID NO: 58047 - DNA, 20 bp, synthetic construct
  misc_feature 1..20: note = chemically synthesized
  source 1..20: mol_type = other DNA
ttttattttattatttgaga

SEQ ID NO: 58048 - DNA, 20 bp, synthetic construct
  misc_feature 1..20: note = chemically synthesized
  source 1..20: mol_type = other DNA
tctcactctgtcacccaggc

SEQ ID NO: 58049 - DNA, 20 bp, synthetic construct
  misc_feature 1..20: note = chemically synthesized
  source 1..20: mol_type = other DNA
gatcctccagcctcagcctc

SEQ ID NO: 58050 - DNA, 20 bp, synthetic construct
  misc_feature 1..20: note = chemically synthesized
  source 1..20: mol_type = other DNA
ttttttattttttgtagaga

SEQ ID NO: 58051 - DNA, 20 bp, synthetic construct
  misc_feature 1..20: note = chemically synthesized
  source 1..20: mol_type = other DNA
gccttagcctcccaaagtgc

SEQ ID NO: 58052 - DNA, 20 bp, synthetic construct
  misc_feature 1..20: note = chemically synthesized
  source 1..20: mol_type = other DNA
caggcagatcacctgagatc

SEQ ID NO: 58053 - DNA, 20 bp, synthetic construct
  misc_feature 1..20: note = chemically synthesized
  source 1..20: mol_type = other DNA
tgcactccaacctgggcaac

SEQ ID NO: 58054 - DNA, 20 bp, synthetic construct
  misc_feature 1..20: note = chemically synthesized
  source 1..20: mol_type = other DNA
tcatttaaagtgtacaattc

SEQ ID NO: 58055 - DNA, 20 bp, synthetic construct
  misc_feature 1..20: note = chemically synthesized
  source 1..20: mol_type = other DNA
gacaagtaatattccattgt

SEQ ID NO: 58056 - DNA, 20 bp, synthetic construct
  misc_feature 1..20: note = chemically synthesized
  source 1..20: mol_type = other DNA
gtatgaatatataacattgt

SEQ ID NO: 58057 - DNA, 20 bp, synthetic construct
  misc_feature 1..20: note = chemically synthesized
  source 1..20: mol_type = other DNA
actttgggaggctgaggcag

SEQ ID NO: 58058 - DNA, 20 bp, synthetic construct
  misc_feature 1..20: note = chemically synthesized
  source 1..20: mol_type = other DNA
gcctcagcctcccaaagtgc

SEQ ID NO: 58059 - DNA, 20 bp, synthetic construct
  misc_feature 1..20: note = chemically synthesized
  source 1..20: mol_type = other DNA
aatgttatatattcatacaa

SEQ ID NO: 58060 - DNA, 20 bp, synthetic construct
  misc_feature 1..20: note = chemically synthesized
  source 1..20: mol_type = other DNA
cacaaaaggccacatattgt

SEQ ID NO: 58061 - DNA, 20 bp, synthetic construct
  misc_feature 1..20: note = chemically synthesized
  source 1..20: mol_type = other DNA
agattagtggttgcctaggc

SEQ ID NO: 58062 - DNA, 20 bp, synthetic construct
  misc_feature 1..20: note = chemically synthesized
  source 1..20: mol_type = other DNA
tagtggttgcctaggcttga

SEQ ID NO: 58063 - DNA, 20 bp, synthetic construct
  misc_feature 1..20: note = chemically synthesized
  source 1..20: mol_type = other DNA
ttgcctaggcttgagtgggt

SEQ ID NO: 58064 - DNA, 20 bp, synthetic construct
  misc_feature 1..20: note = chemically synthesized
  source 1..20: mol_type = other DNA
taggcttgagtgggttggag

SEQ ID NO: 58065 - DNA, 20 bp, synthetic construct
  misc_feature 1..20: note = chemically synthesized
  source 1..20: mol_type = other DNA
ttggagtggaatgaaaaccc

SEQ ID NO: 58066 - DNA, 20 bp, synthetic construct
  misc_feature 1..20: note = chemically synthesized
  source 1..20: mol_type = other DNA
ccctgaattgtacactttaa

SEQ ID NO: 58067 - DNA, 20 bp, synthetic construct
  misc_feature 1..20: note = chemically synthesized
  source 1..20: mol_type = other DNA
gaattgtacactttaaatga

SEQ ID NO: 58068 - DNA, 20 bp, synthetic construct
  misc_feature 1..20: note = chemically synthesized
  source 1..20: mol_type = other DNA
tgagtgaattgtatggtatt

SEQ ID NO: 58069 - DNA, 20 bp, synthetic construct
  misc_feature 1..20: note = chemically synthesized
  source 1..20: mol_type = other DNA
agctttttttttttttgaga

SEQ ID NO: 58070 - DNA, 20 bp, synthetic construct
  misc_feature 1..20: note = chemically synthesized
  source 1..20: mol_type = other DNA
ttcactcttgttgcccaggt

SEQ ID NO: 58071 - DNA, 20 bp, synthetic construct
  misc_feature 1..20: note = chemically synthesized
  source 1..20: mol_type = other DNA
gtctcagcctctcaagtagc

SEQ ID NO: 58072 - DNA, 20 bp, synthetic construct
  misc_feature 1..20: note = chemically synthesized
  source 1..20: mol_type = other DNA
gccttggcttcccaaagtgc

SEQ ID NO: 58073 - DNA, 20 bp, synthetic construct
  misc_feature 1..20: note = chemically synthesized
  source 1..20: mol_type = other DNA
gttaaaaatcaaaaacatgg

SEQ ID NO: 58074 - DNA, 20 bp, synthetic construct
  misc_feature 1..20: note = chemically synthesized
  source 1..20: mol_type = other DNA
actttgggaggctaaggcgg

SEQ ID NO: 58075 - DNA, 20 bp, synthetic construct
  misc_feature 1..20: note = chemically synthesized
  source 1..20: mol_type = other DNA
tattcgggaggctgaggctg

SEQ ID NO: 58076 - DNA, 20 bp, synthetic construct
  misc_feature 1..20: note = chemically synthesized
  source 1..20: mol_type = other DNA
tggaggatcatttgagcccc

SEQ ID NO: 58077 - DNA, 20 bp, synthetic construct
  misc_feature 1..20: note = chemically synthesized
  source 1..20: mol_type = other DNA
ttgcgccattgcaccccagc

SEQ ID NO: 58078 - DNA, 20 bp, synthetic construct
  misc_feature 1..20: note = chemically synthesized
  source 1..20: mol_type = other DNA
ttgcaccccagcctgggtga

SEQ ID NO: 58079 - DNA, 20 bp, synthetic construct
  misc_feature 1..20: note = chemically synthesized
  source 1..20: mol_type = other DNA
gcagaagttggacttcctta

SEQ ID NO: 58080 - DNA, 20 bp, synthetic construct
  misc_feature 1..20: note = chemically synthesized
  source 1..20: mol_type = other DNA
ctattttctttgggcaataa

SEQ ID NO: 58081 - DNA, 20 bp, synthetic construct
  misc_feature 1..20: note = chemically synthesized
  source 1..20: mol_type = other DNA
atctataacttagggaacag

SEQ ID NO: 58082 - DNA, 20 bp, synthetic construct
  misc_feature 1..20: note = chemically synthesized
  source 1..20: mol_type = other DNA
aaaatgttctgtctaataag

SEQ ID NO: 58083 - DNA, 20 bp, synthetic construct
  misc_feature 1..20: note = chemically synthesized
  source 1..20: mol_type = other DNA
caaaatgattattttgtatc

SEQ ID NO: 58084 - DNA, 20 bp, synthetic construct
  misc_feature 1..20: note = chemically synthesized
  source 1..20: mol_type = other DNA
ttttttttttttttctgaga

SEQ ID NO: 58085 - DNA, 20 bp, synthetic construct
  misc_feature 1..20: note = chemically synthesized
  source 1..20: mol_type = other DNA
tctcactctgtcacccaggc

SEQ ID NO: 58086 - DNA, 20 bp, synthetic construct
  misc_feature 1..20: note = chemically synthesized
  source 1..20: mol_type = other DNA
cactgcaacctctgagctca

SEQ ID NO: 58087 - DNA, 20 bp, synthetic construct
  misc_feature 1..20: note = chemically synthesized
  source 1..20: mol_type = other DNA
gattctcccacctcagccac

SEQ ID NO: 58088 - DNA, 20 bp, synthetic construct
  misc_feature 1..20: note = chemically synthesized
  source 1..20: mol_type = other DNA
tttgtatttttggtatagac

SEQ ID NO: 58089 - DNA, 20 bp, synthetic construct
  misc_feature 1..20: note = chemically synthesized
  source 1..20: mol_type = other DNA
acctcagcctcccaaagtgc

SEQ ID NO: 58090 - DNA, 20 bp, synthetic construct
  misc_feature 1..20: note = chemically synthesized
  source 1..20: mol_type = other DNA
tctggacctatttgtaatat

SEQ ID NO: 58091 - DNA, 20 bp, synthetic construct
  misc_feature 1..20: note = chemically synthesized
  source 1..20: mol_type = other DNA
agagatgttgggagaactaa

SEQ ID NO: 58092 - DNA, 20 bp, synthetic construct
  misc_feature 1..20: note = chemically synthesized
  source 1..20: mol_type = other DNA
tataaataaagtacatagaa

SEQ ID NO: 58093 - DNA, 20 bp, synthetic construct
  misc_feature 1..20: note = chemically synthesized
  source 1..20: mol_type = other DNA
tatcaacctcataaacttca

SEQ ID NO: 58094 - DNA, 20 bp, synthetic construct
  misc_feature 1..20: note = chemically synthesized
  source 1..20: mol_type = other DNA
ttctggcagacctttcttgt

SEQ ID NO: 58095 - DNA, 20 bp, synthetic construct
  misc_feature 1..20: note = chemically synthesized
  source 1..20: mol_type = other DNA
ttgggagcaaatagattatc

SEQ ID NO: 58096 - DNA, 20 bp, synthetic construct
  misc_feature 1..20: note = chemically synthesized
  source 1..20: mol_type = other DNA
atggggctatgcctaagcag

SEQ ID NO: 58097 - DNA, 20 bp, synthetic construct
  misc_feature 1..20: note = chemically synthesized
  source 1..20: mol_type = other DNA
actttgggaggctgaggcag

SEQ ID NO: 58098 - DNA, 20 bp, synthetic construct
  misc_feature 1..20: note = chemically synthesized
  source 1..20: mol_type = other DNA
caggaggatcacttgaaccc

SEQ ID NO: 58099 - DNA, 20 bp, synthetic construct
  misc_feature 1..20: note = chemically synthesized
  source 1..20: mol_type = other DNA
tgagagcccaaatccagtag

SEQ ID NO: 58100 - DNA, 20 bp, synthetic construct
  misc_feature 1..20: note = chemically synthesized
  source 1..20: mol_type = other DNA
gtaggagaatgcaatcttcc

SEQ ID NO: 58101 - DNA, 20 bp, synthetic construct
  misc_feature 1..20: note = chemically synthesized
  source 1..20: mol_type = other DNA
ttccctgaatatacagactc

SEQ ID NO: 58102 - DNA, 20 bp, synthetic construct
  misc_feature 1..20: note = chemically synthesized
  source 1..20: mol_type = other DNA
tggaggtcgaaccctgcacc

SEQ ID NO: 58103 - DNA, 20 bp, synthetic construct
  misc_feature 1..20: note = chemically synthesized
  source 1..20: mol_type = other DNA
aacccaaaaccttgctgaca

SEQ ID NO: 58104 - DNA, 20 bp, synthetic construct
  misc_feature 1..20: note = chemically synthesized
  source 1..20: mol_type = other DNA
accttgctgacactgagtta

SEQ ID NO: 58105 - DNA, 20 bp, synthetic construct
  misc_feature 1..20: note = chemically synthesized
  source 1..20: mol_type = other DNA
atgttcattcttggccaact

SEQ ID NO: 58106 - DNA, 20 bp, synthetic construct
  misc_feature 1..20: note = chemically synthesized
  source 1..20: mol_type = other DNA
tcaactctgcctgtgcccct

SEQ ID NO: 58107 - DNA, 20 bp, synthetic construct
  misc_feature 1..20: note = chemically synthesized
  source 1..20: mol_type = other DNA
agctagaaatttagttgggc

SEQ ID NO: 58108 - DNA, 20 bp, synthetic construct
  misc_feature 1..20: note = chemically synthesized
  source 1..20: mol_type = other DNA
cttttcaaagatgttatgag

SEQ ID NO: 58109 - DNA, 20 bp, synthetic construct
  misc_feature 1..20: note = chemically synthesized
  source 1..20: mol_type = other DNA
ttatgagcaggatggttgtt

SEQ ID NO: 58110 - DNA, 20 bp, synthetic construct
  misc_feature 1..20: note = chemically synthesized
  source 1..20: mol_type = other DNA
ataggcttcagctttttttg

SEQ ID NO: 58111 - DNA, 20 bp, synthetic construct
  misc_feature 1..20: note = chemically synthesized
  source 1..20: mol_type = other DNA
cagctttttttggggggtag

SEQ ID NO: 58112 - DNA, 20 bp, synthetic construct
  misc_feature 1..20: note = chemically synthesized
  source 1..20: mol_type = other DNA
accttgggaggccaaggcag

SEQ ID NO: 58113 - DNA, 20 bp, synthetic construct
  misc_feature 1..20: note = chemically synthesized
  source 1..20: mol_type = other DNA
caggtggatcacttgaggtc

SEQ ID NO: 58114 - DNA, 20 bp, synthetic construct
  misc_feature 1..20: note = chemically synthesized
  source 1..20: mol_type = other DNA
tactgaggaggctgagacat

SEQ ID NO: 58115 - DNA, 20 bp, synthetic construct
  misc_feature 1..20: note = chemically synthesized
  source 1..20: mol_type = other DNA
tcgtgccactccactccagc

SEQ ID NO: 58116 - DNA, 20 bp, synthetic construct
  misc_feature 1..20: note = chemically synthesized
  source 1..20: mol_type = other DNA
aaaaagaaaagcaggcaagg

SEQ ID NO: 58117 - DNA, 20 bp, synthetic construct
  misc_feature 1..20: note = chemically synthesized
  source 1..20: mol_type = other DNA
agctacgcgggacgctgtgg

SEQ ID NO: 58118 - DNA, 20 bp, synthetic construct
  misc_feature 1..20: note = chemically synthesized
  source 1..20: mol_type = other DNA
tgggaggactgcttgagccc

SEQ ID NO: 58119 - DNA, 20 bp, synthetic construct
  misc_feature 1..20: note = chemically synthesized
  source 1..20: mol_type = other DNA
aagatgttgacttttccttt

SEQ ID NO: 58120 - DNA, 20 bp, synthetic construct
  misc_feature 1..20: note = chemically synthesized
  source 1..20: mol_type = other DNA
gaatgtgctcttggttggct

SEQ ID NO: 58121 - DNA, 20 bp, synthetic construct
  misc_feature 1..20: note = chemically synthesized
  source 1..20: mol_type = other DNA
ggttggcttgggatagagaa

SEQ ID NO: 58122 - DNA, 20 bp, synthetic construct
  misc_feature 1..20: note = chemically synthesized
  source 1..20: mol_type = other DNA
aggagtcatatttaccctct

SEQ ID NO: 58123 - DNA, 20 bp, synthetic construct
  misc_feature 1..20: note = chemically synthesized
  source 1..20: mol_type = other DNA
ctaggaattaaaagtaacac

SEQ ID NO: 58124 - DNA, 20 bp, synthetic construct
  misc_feature 1..20: note = chemically synthesized
  source 1..20: mol_type = other DNA
acactggagtgacctgagag

SEQ ID NO: 58125 - DNA, 20 bp, synthetic construct
  misc_feature 1..20: note = chemically synthesized
  source 1..20: mol_type = other DNA
gaaacatacaaaagcaccac

SEQ ID NO: 58126 - DNA, 20 bp, synthetic construct
  misc_feature 1..20: note = chemically synthesized
  source 1..20: mol_type = other DNA
ctagccttctgaagatccag

SEQ ID NO: 58127 - DNA, 20 bp, synthetic construct
  misc_feature 1..20: note = chemically synthesized
  source 1..20: mol_type = other DNA
ccttctgaagatccagtggg

SEQ ID NO: 58128 - DNA, 20 bp, synthetic construct
  misc_feature 1..20: note = chemically synthesized
  source 1..20: mol_type = other DNA
ggtggatgtggagccagtgg

SEQ ID NO: 58129 - DNA, 20 bp, synthetic construct
  misc_feature 1..20: note = chemically synthesized
  source 1..20: mol_type = other DNA
agcagagctgggcttataag

SEQ ID NO: 58130 - DNA, 20 bp, synthetic construct
  misc_feature 1..20: note = chemically synthesized
  source 1..20: mol_type = other DNA
agaggagatgtcagctatac

SEQ ID NO: 58131 - DNA, 20 bp, synthetic construct
  misc_feature 1..20: note = chemically synthesized
  source 1..20: mol_type = other DNA
gttttgacctagtgcaatat

SEQ ID NO: 58132 - DNA, 20 bp, synthetic construct
  misc_feature 1..20: note = chemically synthesized
  source 1..20: mol_type = other DNA
agtaaaaaaaatactagaag

SEQ ID NO: 58133 - DNA, 20 bp, synthetic construct
  misc_feature 1..20: note = chemically synthesized
  source 1..20: mol_type = other DNA
taagctggtcccccattact

SEQ ID NO: 58134 - DNA, 20 bp, synthetic construct
  misc_feature 1..20: note = chemically synthesized
  source 1..20: mol_type = other DNA
tcctttctccttttctcggt

SEQ ID NO: 58135 - DNA, 20 bp, synthetic construct
  misc_feature 1..20: note = chemically synthesized
  source 1..20: mol_type = other DNA
acaggtagaaaattctcagt

SEQ ID NO: 58136 - DNA, 20 bp, synthetic construct
  misc_feature 1..20: note = chemically synthesized
  source 1..20: mol_type = other DNA
tgcttttgtatatgtgacgg

SEQ ID NO: 58137 - DNA, 20 bp, synthetic construct
  misc_feature 1..20: note = chemically synthesized
  source 1..20: mol_type = other DNA
aaaacattacccaatatgat

SEQ ID NO: 58138 - DNA, 20 bp, synthetic construct
  misc_feature 1..20: note = chemically synthesized
  source 1..20: mol_type = other DNA
ataaaatgggctgttccagt

SEQ ID NO: 58139 - DNA, 20 bp, synthetic construct
  misc_feature 1..20: note = chemically synthesized
  source 1..20: mol_type = other DNA
ggagtgagctccctacttgt

SEQ ID NO: 58140 - DNA, 20 bp, synthetic construct
  misc_feature 1..20: note = chemically synthesized
  source 1..20: mol_type = other DNA
gatatggcacctccatctga

SEQ ID NO: 58141 - DNA, 20 bp, synthetic construct
  misc_feature 1..20: note = chemically synthesized
  source 1..20: mol_type = other DNA
agtctgtgctgagggcaggc

SEQ ID NO: 58142 - DNA, 20 bp, synthetic construct
  misc_feature 1..20: note = chemically synthesized
  source 1..20: mol_type = other DNA
ggcaggctggagtcacacat

SEQ ID NO: 58143 - DNA, 20 bp, synthetic construct
  misc_feature 1..20: note = chemically synthesized
  source 1..20: mol_type = other DNA
gtgatttaattccacgacgg

SEQ ID NO: 58144 - DNA, 20 bp, synthetic construct
  misc_feature 1..20: note = chemically synthesized
  source 1..20: mol_type = other DNA
tttaattccacgacggcaga

SEQ ID NO: 58145 - DNA, 20 bp, synthetic construct
  misc_feature 1..20: note = chemically synthesized
  source 1..20: mol_type = other DNA
aggacctgggcgaggcagta

SEQ ID NO: 58146 - DNA, 20 bp, synthetic construct
  misc_feature 1..20: note = chemically synthesized
  source 1..20: mol_type = other DNA
ggcagtaggggatgacactg

SEQ ID NO: 58147 - DNA, 20 bp, synthetic construct
  misc_feature 1..20: note = chemically synthesized
  source 1..20: mol_type = other DNA
cgtagaagaccagctcgact

SEQ ID NO: 58148 - DNA, 20 bp, synthetic construct
  misc_feature 1..20: note = chemically synthesized
  source 1..20: mol_type = other DNA
agaccagctcgacttgggat

SEQ ID NO: 58149 - DNA, 20 bp, synthetic construct
  misc_feature 1..20: note = chemically synthesized
  source 1..20: mol_type = other DNA
gacttgggatgggggtttca

SEQ ID NO: 58150 - DNA, 20 bp, synthetic construct
  misc_feature 1..20: note = chemically synthesized
  source 1..20: mol_type = other DNA
aggctacaatagagctgagg

SEQ ID NO: 58151 - DNA, 20 bp, synthetic construct
  misc_feature 1..20: note = chemically synthesized
  source 1..20: mol_type = other DNA
ggcggaatgggagccacttg

SEQ ID NO: 58152 - DNA, 20 bp, synthetic construct
  misc_feature 1..20: note = chemically synthesized
  source 1..20: mol_type = other DNA
gcagctctccctgtacatgc

SEQ ID NO: 58153 - DNA, 20 bp, synthetic construct
  misc_feature 1..20: note = chemically synthesized
  source 1..20: mol_type = other DNA
ggttcttgaggaggctggca

SEQ ID NO: 58154 - DNA, 20 bp, synthetic construct
  misc_feature 1..20: note = chemically synthesized
  source 1..20: mol_type = other DNA
caccacctctgggctttctc

SEQ ID NO: 58155 - DNA, 20 bp, synthetic construct
  misc_feature 1..20: note = chemically synthesized
  source 1..20: mol_type = other DNA
aggctggcattatagatgct

SEQ ID NO: 58156 - DNA, 20 bp, synthetic construct
  misc_feature 1..20: note = chemically synthesized
  source 1..20: mol_type = other DNA
agtttctgcaacagcaatgc

SEQ ID NO: 58157 - DNA, 20 bp, synthetic construct
  misc_feature 1..20: note = chemically synthesized
  source 1..20: mol_type = other DNA
gcatgactgtgagagatagg

SEQ ID NO: 58158 - DNA, 20 bp, synthetic construct
  misc_feature 1..20: note = chemically synthesized
  source 1..20: mol_type = other DNA
atttgggacctttgctagag

SEQ ID NO: 58159 - DNA, 20 bp, synthetic construct
  misc_feature 1..20: note = chemically synthesized
  source 1..20: mol_type = other DNA
tttgctagaggtgggtttgg

SEQ ID NO: 58160 - DNA, 20 bp, synthetic construct
  misc_feature 1..20: note = chemically synthesized
  source 1..20: mol_type = other DNA
ctagaggtgggtttggagga

SEQ ID NO: 58161 - DNA, 20 bp, synthetic construct
  misc_feature 1..20: note = chemically synthesized
  source 1..20: mol_type = other DNA
tgccatccgttctgcgactg

SEQ ID NO: 58162 - DNA, 20 bp, synthetic construct
  misc_feature 1..20: note = chemically synthesized
  source 1..20: mol_type = other DNA
aaatcacagatggcagatgg

SEQ ID NO: 58163 - DNA, 20 bp, synthetic construct
  misc_feature 1..20: note = chemically synthesized
  source 1..20: mol_type = other DNA
cagtccattttatctttgaa

SEQ ID NO: 58164 - DNA, 20 bp, synthetic construct
  misc_feature 1..20: note = chemically synthesized
  source 1..20: mol_type = other DNA
tctttgaacggaattgattg

SEQ ID NO: 58165 - DNA, 20 bp, synthetic construct
  misc_feature 1..20: note = chemically synthesized
  source 1..20: mol_type = other DNA
tttttctcagttctttctgc

SEQ ID NO: 58166 - DNA, 20 bp, synthetic construct
  misc_feature 1..20: note = chemically synthesized
  source 1..20: mol_type = other DNA
tctgcaggagttagtaagtg

SEQ ID NO: 58167 - DNA, 20 bp, synthetic construct
  misc_feature 1..20: note = chemically synthesized
  source 1..20: mol_type = other DNA
cttgttctcaacattcttct

SEQ ID NO: 58168 - DNA, 20 bp, synthetic construct
  misc_feature 1..20: note = chemically synthesized
  source 1..20: mol_type = other DNA
tcttgtcttacccttgttaa

SEQ ID NO: 58169 - DNA, 20 bp, synthetic construct
  misc_feature 1..20: note = chemically synthesized
  source 1..20: mol_type = other DNA
taagaaaacacatattcagg

SEQ ID NO: 58170 - DNA, 20 bp, synthetic construct
  misc_feature 1..20: note = chemically synthesized
  source 1..20: mol_type = other DNA
gctttgggaggccgaggcgg

SEQ ID NO: 58171 - DNA, 20 bp, synthetic construct
  misc_feature 1..20: note = chemically synthesized
  source 1..20: mol_type = other DNA
actcggagaggctgaggcag

SEQ ID NO: 58172 - DNA, 20 bp, synthetic construct
  misc_feature 1..20: note = chemically synthesized
  source 1..20: mol_type = other DNA
tcgcaccactgcactctagc

SEQ ID NO: 58173 - DNA, 20 bp, synthetic construct
  misc_feature 1..20: note = chemically synthesized
  source 1..20: mol_type = other DNA
gttatctattaggtttgcaa

SEQ ID NO: 58174 - DNA, 20 bp, synthetic construct
  misc_feature 1..20: note = chemically synthesized
  source 1..20: mol_type = other DNA
ctaacagtactgattacaca

SEQ ID NO: 58175 - DNA, 20 bp, synthetic construct
  misc_feature 1..20: note = chemically synthesized
  source 1..20: mol_type = other DNA
gattacacacaggatgtggc

SEQ ID NO: 58176 - DNA, 20 bp, synthetic construct
  misc_feature 1..20: note = chemically synthesized
  source 1..20: mol_type = other DNA
acaggatgtggctggaatgc

SEQ ID NO: 58177 - DNA, 20 bp, synthetic construct
  misc_feature 1..20: note = chemically synthesized
  source 1..20: mol_type = other DNA
gtcctgattagggagagaaa

SEQ ID NO: 58178 - DNA, 20 bp, synthetic construct
  misc_feature 1..20: note = chemically synthesized
  source 1..20: mol_type = other DNA
gattagggagagaaacggaa

SEQ ID NO: 58179 - DNA, 20 bp, synthetic construct
  misc_feature 1..20: note = chemically synthesized
  source 1..20: mol_type = other DNA
ggggtttgggggagaaggaa

SEQ ID NO: 58180 - DNA, 20 bp, synthetic construct
  misc_feature 1..20: note = chemically synthesized
  source 1..20: mol_type = other DNA
agacattcagctgcacagcc

SEQ ID NO: 58181 - DNA, 20 bp, synthetic construct
  misc_feature 1..20: note = chemically synthesized
  source 1..20: mol_type = other DNA
gcaaacttaggtgctctcag

SEQ ID NO: 58182 - DNA, 20 bp, synthetic construct
  misc_feature 1..20: note = chemically synthesized
  source 1..20: mol_type = other DNA
ccaaagatgcctgttggggg

SEQ ID NO: 58183 - DNA, 20 bp, synthetic construct
  misc_feature 1..20: note = chemically synthesized
  source 1..20: mol_type = other DNA
actttgggaggccgaggtga

SEQ ID NO: 58184 - DNA, 20 bp, synthetic construct
  misc_feature 1..20: note = chemically synthesized
  source 1..20: mol_type = other DNA
tgagaggatcacttgaggcc

SEQ ID NO: 58185 - DNA, 20 bp, synthetic construct
  misc_feature 1..20: note = chemically synthesized
  source 1..20: mol_type = other DNA
cagcactttgggaggccgag

SEQ ID NO: 58186 - DNA, 20 bp, synthetic construct
  misc_feature 1..20: note = chemically synthesized
  source 1..20: mol_type = other DNA
actttgggaggccgaggtgg

SEQ ID NO: 58187 - DNA, 20 bp, synthetic construct
  misc_feature 1..20: note = chemically synthesized
  source 1..20: mol_type = other DNA
tgggtggatcacttgaggtc

SEQ ID NO: 58188 - DNA, 20 bp, synthetic construct
  misc_feature 1..20: note = chemically synthesized
  source 1..20: mol_type = other DNA
aaattacaaaattagccagg

SEQ ID NO: 58189 - DNA, 20 bp, synthetic construct
  misc_feature 1..20: note = chemically synthesized
  source 1..20: mol_type = other DNA
tatttgagaggctgaggcag

SEQ ID NO: 58190 - DNA, 20 bp, synthetic construct
  misc_feature 1..20: note = chemically synthesized
  source 1..20: mol_type = other DNA
cagcactttgggaggctgag

SEQ ID NO: 58191 - DNA, 20 bp, synthetic construct
  misc_feature 1..20: note = chemically synthesized
  source 1..20: mol_type = other DNA
actttgggaggctgaggcgg

SEQ ID NO: 58192 - DNA, 20 bp, synthetic construct
  misc_feature 1..20: note = chemically synthesized
  source 1..20: mol_type = other DNA
ggcggatggatcactaggtc

SEQ ID NO: 58193 - DNA, 20 bp, synthetic construct
  misc_feature 1..20: note = chemically synthesized
  source 1..20: mol_type = other DNA
tactcggtaggctgaggcag

SEQ ID NO: 58194 - DNA, 20 bp, synthetic construct
  misc_feature 1..20: note = chemically synthesized
  source 1..20: mol_type = other DNA
agtggttaacccttgtgtat

SEQ ID NO: 58195 - DNA, 20 bp, synthetic construct
  misc_feature 1..20: note = chemically synthesized
  source 1..20: mol_type = other DNA
attttatctgtttgataatt

SEQ ID NO: 58196 - DNA, 20 bp, synthetic construct
  misc_feature 1..20: note = chemically synthesized
  source 1..20: mol_type = other DNA
aaaaagatacgagaaattag

SEQ ID NO: 58197 - DNA, 20 bp, synthetic construct
  misc_feature 1..20: note = chemically synthesized
  source 1..20: mol_type = other DNA
tactcagatggctgaggtgg

SEQ ID NO: 58198 - DNA, 20 bp, synthetic construct
  misc_feature 1..20: note = chemically synthesized
  source 1..20: mol_type = other DNA
tcgtgccactgcacttcagc

SEQ ID NO: 58199 - DNA, 20 bp, synthetic construct
  misc_feature 1..20: note = chemically synthesized
  source 1..20: mol_type = other DNA
atctcaaaaataaaaataaa

SEQ ID NO: 58200 - DNA, 20 bp, synthetic construct
  misc_feature 1..20: note = chemically synthesized
  source 1..20: mol_type = other DNA
ttgcactgtggctgcacacc

SEQ ID NO: 58201 - DNA, 20 bp, synthetic construct
  misc_feature 1..20: note = chemically synthesized
  source 1..20: mol_type = other DNA
cacccggaattctctgtagt

SEQ ID NO: 58202 - DNA, 20 bp, synthetic construct
  misc_feature 1..20: note = chemically synthesized
  source 1..20: mol_type = other DNA
gtttctctggttattttaac

SEQ ID NO: 58203 - DNA, 20 bp, synthetic construct
  misc_feature 1..20: note = chemically synthesized
  source 1..20: mol_type = other DNA
ctctggttattttaacctgg

SEQ ID NO: 58204 - DNA, 20 bp, synthetic construct
  misc_feature 1..20: note = chemically synthesized
  source 1..20: mol_type = other DNA
actctgtggttggtacagac

SEQ ID NO: 58205 - DNA, 20 bp, synthetic construct
  misc_feature 1..20: note = chemically synthesized
  source 1..20: mol_type = other DNA
gtttccttatctgtaaaaca

SEQ ID NO: 58206 - DNA, 20 bp, synthetic construct
  misc_feature 1..20: note = chemically synthesized
  source 1..20: mol_type = other DNA
taaaacaacggattgcacta

SEQ ID NO: 58207 - DNA, 20 bp, synthetic construct
  misc_feature 1..20: note = chemically synthesized
  source 1..20: mol_type = other DNA
caggtgtgggagcgggctag

SEQ ID NO: 58208 - DNA, 20 bp, synthetic construct
  misc_feature 1..20: note = chemically synthesized
  source 1..20: mol_type = other DNA
cgggctagggggatgtgagg

SEQ ID NO: 58209 - DNA, 20 bp, synthetic construct
  misc_feature 1..20: note = chemically synthesized
  source 1..20: mol_type = other DNA
ccaccacctacaccccagtg

SEQ ID NO: 58210 - DNA, 20 bp, synthetic construct
  misc_feature 1..20: note = chemically synthesized
  source 1..20: mol_type = other DNA
atctttccctgaaagatgga

SEQ ID NO: 58211 - DNA, 20 bp, synthetic construct
  misc_feature 1..20: note = chemically synthesized
  source 1..20: mol_type = other DNA
gctccctaaagggcaggaaa

SEQ ID NO: 58212 - DNA, 20 bp, synthetic construct
  misc_feature 1..20: note = chemically synthesized
  source 1..20: mol_type = other DNA
ctaaagggcaggaaagagaa

SEQ ID NO: 58213 - DNA, 20 bp, synthetic construct
  misc_feature 1..20: note = chemically synthesized
  source 1..20: mol_type = other DNA
caagcattgtgcaaggctct

SEQ ID NO: 58214 - DNA, 20 bp, synthetic construct
  misc_feature 1..20: note = chemically synthesized
  source 1..20: mol_type = other DNA
tacagtctggagattacaca

SEQ ID NO: 58215 - DNA, 20 bp, synthetic construct
  misc_feature 1..20: note = chemically synthesized
  source 1..20: mol_type = other DNA
actcagatctcatattctca

SEQ ID NO: 58216 - DNA, 20 bp, synthetic construct
  misc_feature 1..20: note = chemically synthesized
  source 1..20: mol_type = other DNA
aatcctcccacctcagcccc

SEQ ID NO: 58217 - DNA, 20 bp, synthetic construct
  misc_feature 1..20: note = chemically synthesized
  source 1..20: mol_type = other DNA
cccttggcctcccaaagtgt

SEQ ID NO: 58218 - DNA, 20 bp, synthetic construct
  misc_feature 1..20: note = chemically synthesized
  source 1..20: mol_type = other DNA
ttcctctaccctgagagata

SEQ ID NO: 58219 - DNA, 20 bp, synthetic construct
  misc_feature 1..20: note = chemically synthesized
  source 1..20: mol_type = other DNA
ggacttatttcgtagctgtt

SEQ ID NO: 58220 - DNA, 20 bp, synthetic construct
  misc_feature 1..20: note = chemically synthesized
  source 1..20: mol_type = other DNA
tggcattgccctgggctaaa

SEQ ID NO: 58221 - DNA, 20 bp, synthetic construct
  misc_feature 1..20: note = chemically synthesized
  source 1..20: mol_type = other DNA
gatcaaggttacgctctccc

SEQ ID NO: 58222 - DNA, 20 bp, synthetic construct
  misc_feature 1..20: note = chemically synthesized
  source 1..20: mol_type = other DNA
cccagcttcagagctcgctg

SEQ ID NO: 58223 - DNA, 20 bp, synthetic construct
  misc_feature 1..20: note = chemically synthesized
  source 1..20: mol_type = other DNA
cttcagagctcgctgtgggg

SEQ ID NO: 58224 - DNA, 20 bp, synthetic construct
  misc_feature 1..20: note = chemically synthesized
  source 1..20: mol_type = other DNA
cgctgtggggttggatgagg

SEQ ID NO: 58225 - DNA, 20 bp, synthetic construct
  misc_feature 1..20: note = chemically synthesized
  source 1..20: mol_type = other DNA
cttctacaagtatagttccc

SEQ ID NO: 58226 - DNA, 20 bp, synthetic construct
  misc_feature 1..20: note = chemically synthesized
  source 1..20: mol_type = other DNA
gagtatctaaactcctgcac

SEQ ID NO: 58227 - DNA, 20 bp, synthetic construct
  misc_feature 1..20: note = chemically synthesized
  source 1..20: mol_type = other DNA
aacactaacaattatatacc

SEQ ID NO: 58228 - DNA, 20 bp, synthetic construct
  misc_feature 1..20: note = chemically synthesized
  source 1..20: mol_type = other DNA
cttttttttttttttcctga

SEQ ID NO: 58229 - DNA, 20 bp, synthetic construct
  misc_feature 1..20: note = chemically synthesized
  source 1..20: mol_type = other DNA
tctttctctgtcaccaaggc

SEQ ID NO: 58230 - DNA, 20 bp, synthetic construct
  misc_feature 1..20: note = chemically synthesized
  source 1..20: mol_type = other DNA
ctcactgcaacctctgcctc

SEQ ID NO: 58231 - DNA, 20 bp, synthetic construct
  misc_feature 1..20: note = chemically synthesized
  source 1..20: mol_type = other DNA
gattctcctgccgcagcctc

SEQ ID NO: 58232 - DNA, 20 bp, synthetic construct
  misc_feature 1..20: note = chemically synthesized
  source 1..20: mol_type = other DNA
gccgcagcctcctgggtagc

SEQ ID NO: 58233 - DNA, 20 bp, synthetic construct
  misc_feature 1..20: note = chemically synthesized
  source 1..20: mol_type = other DNA
gcgttggcctcccaaagtgc

SEQ ID NO: 58234 - DNA, 20 bp, synthetic construct
  misc_feature 1..20: note = chemically synthesized
  source 1..20: mol_type = other DNA
tctcattttgtcgcccaggc

SEQ ID NO: 58235 - DNA, 20 bp, synthetic construct
  misc_feature 1..20: note = chemically synthesized
  source 1..20: mol_type = other DNA
gattctcctgccttagcctc

SEQ ID NO: 58236 - DNA, 20 bp, synthetic construct
  misc_feature 1..20: note = chemically synthesized
  source 1..20: mol_type = other DNA
ttttgtatttttagtagaga

SEQ ID NO: 58237 - DNA, 20 bp, synthetic construct
  misc_feature 1..20: note = chemically synthesized
  source 1..20: mol_type = other DNA
gcctcagcctcccaaagtgc

SEQ ID NO: 58238 - DNA, 20 bp, synthetic construct
  misc_feature 1..20: note = chemically synthesized
  source 1..20: mol_type = other DNA
ctcccaaagtgctgggatta

SEQ ID NO: 58239 - DNA, 20 bp, synthetic construct
  misc_feature 1..20: note = chemically synthesized
  source 1..20: mol_type = other DNA
agtttactttttttttgaga

SEQ ID NO: 58240 - DNA, 20 bp, synthetic construct
  misc_feature 1..20: note = chemically synthesized
  source 1..20: mol_type = other DNA
tctcgttctgtcattcaggc

SEQ ID NO: 58241 - DNA, 20 bp, synthetic construct
  misc_feature 1..20: note = chemically synthesized
  source 1..20: mol_type = other DNA
ttttccatttttagtaaaga

SEQ ID NO: 58242 - DNA, 20 bp, synthetic construct
  misc_feature 1..20: note = chemically synthesized
  source 1..20: mol_type = other DNA
accttggcttcccaaagtgc

SEQ ID NO: 58243 - DNA, 20 bp, synthetic construct
  misc_feature 1..20: note = chemically synthesized
  source 1..20: mol_type = other DNA
gatttcagctccacaagggc

SEQ ID NO: 58244 - DNA, 20 bp, synthetic construct
  misc_feature 1..20: note = chemically synthesized
  source 1..20: mol_type = other DNA
aggtgcttggtaagtaacag

SEQ ID NO: 58245 - DNA, 20 bp, synthetic construct
  misc_feature 1..20: note = chemically synthesized
  source 1..20: mol_type = other DNA
gcttggtaagtaacagctga

SEQ ID NO: 58246 - DNA, 20 bp, synthetic construct
  misc_feature 1..20: note = chemically synthesized
  source 1..20: mol_type = other DNA
ggtaagtaacagctgaatga

SEQ ID NO: 58247 - DNA, 20 bp, synthetic construct
  misc_feature 1..20: note = chemically synthesized
  source 1..20: mol_type = other DNA
taagggaccttccctagttt

SEQ ID NO: 58248 - DNA, 20 bp, synthetic construct
  misc_feature 1..20: note = chemically synthesized
  source 1..20: mol_type = other DNA
cctagttttggggtcaggga

SEQ ID NO: 58249 - DNA, 20 bp, synthetic construct
  misc_feature 1..20: note = chemically synthesized
  source 1..20: mol_type = other DNA
agggaaagggtctctgagga

SEQ ID NO: 58250 - DNA, 20 bp, synthetic construct
  misc_feature 1..20: note = chemically synthesized
  source 1..20: mol_type = other DNA
gaagggatactagtacctta

SEQ ID NO: 58251 - DNA, 20 bp, synthetic construct
  misc_feature 1..20: note = chemically synthesized
  source 1..20: mol_type = other DNA
ttagagggcagctgagactt

SEQ ID NO: 58252 - DNA, 20 bp, synthetic construct
  misc_feature 1..20: note = chemically synthesized
  source 1..20: mol_type = other DNA
acgtaggcacagagagggca

SEQ ID NO: 58253 - DNA, 20 bp, synthetic construct
  misc_feature 1..20: note = chemically synthesized
  source 1..20: mol_type = other DNA
ctctcacgagccctttgccc

SEQ ID NO: 58254 - DNA, 20 bp, synthetic construct
  misc_feature 1..20: note = chemically synthesized
  source 1..20: mol_type = other DNA
ttcaggaaagtattgcagaa

SEQ ID NO: 58255 - DNA, 20 bp, synthetic construct
  misc_feature 1..20: note = chemically synthesized
  source 1..20: mol_type = other DNA
agagcatgacaaaagtacaa

SEQ ID NO: 58256 - DNA, 20 bp, synthetic construct
  misc_feature 1..20: note = chemically synthesized
  source 1..20: mol_type = other DNA
cagtatggacgctgtccaaa

SEQ ID NO: 58257 - DNA, 20 bp, synthetic construct
  misc_feature 1..20: note = chemically synthesized
  source 1..20: mol_type = other DNA
ggaaaaacagaacaagtttc

SEQ ID NO: 58258 - DNA, 20 bp, synthetic construct
  misc_feature 1..20: note = chemically synthesized
  source 1..20: mol_type = other DNA
agaacaagtttctggggtta

SEQ ID NO: 58259 - DNA, 20 bp, synthetic construct
  misc_feature 1..20: note = chemically synthesized
  source 1..20: mol_type = other DNA
caagtttctggggttactga

SEQ ID NO: 58260 - DNA, 20 bp, synthetic construct
  misc_feature 1..20: note = chemically synthesized
  source 1..20: mol_type = other DNA
ccaaagcctacaccttcaag

SEQ ID NO: 58261 - DNA, 20 bp, synthetic construct
  misc_feature 1..20: note = chemically synthesized
  source 1..20: mol_type = other DNA
caagaagagtgtagcctgag

SEQ ID NO: 58262 - DNA, 20 bp, synthetic construct
  misc_feature 1..20: note = chemically synthesized
  source 1..20: mol_type = other DNA
gttgcctctagaagggagaa

SEQ ID NO: 58263 - DNA, 20 bp, synthetic construct
  misc_feature 1..20: note = chemically synthesized
  source 1..20: mol_type = other DNA
acttttgcattttgaactgt

SEQ ID NO: 58264 - DNA, 20 bp, synthetic construct
  misc_feature 1..20: note = chemically synthesized
  source 1..20: mol_type = other DNA
tatcttttttttttttgaga

SEQ ID NO: 58265 - DNA, 20 bp, synthetic construct
  misc_feature 1..20: note = chemically synthesized
  source 1..20: mol_type = other DNA
tctggctcagtaacccagcc

SEQ ID NO: 58266 - DNA, 20 bp, synthetic construct
  misc_feature 1..20: note = chemically synthesized
  source 1..20: mol_type = other DNA
tcattgtgacctctacctcc

SEQ ID NO: 58267 - DNA, 20 bp, synthetic construct
  misc_feature 1..20: note = chemically synthesized
  source 1..20: mol_type = other DNA
gatcctcccacctcagcctc

SEQ ID NO: 58268 - DNA, 20 bp, synthetic construct
  misc_feature 1..20: note = chemically synthesized
  source 1..20: mol_type = other DNA
ttttgtatttttagtagaga

SEQ ID NO: 58269 - DNA, 20 bp, synthetic construct
  misc_feature 1..20: note = chemically synthesized
  source 1..20: mol_type = other DNA
acctcagcctcccaaagtgc

SEQ ID NO: 58270 - DNA, 20 bp, synthetic construct
  misc_feature 1..20: note = chemically synthesized
  source 1..20: mol_type = other DNA
caggcagatcacatgaggtc

SEQ ID NO: 58271 - DNA, 20 bp, synthetic construct
  misc_feature 1..20: note = chemically synthesized
  source 1..20: mol_type = other DNA
cgtttctaccaaaaaatata

SEQ ID NO: 58272 - DNA, 20 bp, synthetic construct
  misc_feature 1..20: note = chemically synthesized
  source 1..20: mol_type = other DNA
tactcgggaggctaaggcaa

SEQ ID NO: 58273 - DNA, 20 bp, synthetic construct
  misc_feature 1..20: note = chemically synthesized
  source 1..20: mol_type = other DNA
ttatgccactgcactacagg

SEQ ID NO: 58274 - DNA, 20 bp, synthetic construct
  misc_feature 1..20: note = chemically synthesized
  source 1..20: mol_type = other DNA
tcaagaagtatttgtcctgg

SEQ ID NO: 58275 - DNA, 20 bp, synthetic construct
  misc_feature 1..20: note = chemically synthesized
  source 1..20: mol_type = other DNA
aacttggacttgcatatacc

SEQ ID NO: 58276 - DNA, 20 bp, synthetic construct
  misc_feature 1..20: note = chemically synthesized
  source 1..20: mol_type = other DNA
atgggttccctcaggcctca

SEQ ID NO: 58277 - DNA, 20 bp, synthetic construct
  misc_feature 1..20: note = chemically synthesized
  source 1..20: mol_type = other DNA
ttgcatttcctctgacatca

SEQ ID NO: 58278 - DNA, 20 bp, synthetic construct
  misc_feature 1..20: note = chemically synthesized
  source 1..20: mol_type = other DNA
aacatggcctgcatttccat

SEQ ID NO: 58279 - DNA, 20 bp, synthetic construct
  misc_feature 1..20: note = chemically synthesized
  source 1..20: mol_type = other DNA
ccatcagaattgctctctgt

SEQ ID NO: 58280 - DNA, 20 bp, synthetic construct
  misc_feature 1..20: note = chemically synthesized
  source 1..20: mol_type = other DNA
gtatcctctctactttgaaa

SEQ ID NO: 58281 - DNA, 20 bp, synthetic construct
  misc_feature 1..20: note = chemically synthesized
  source 1..20: mol_type = other DNA
aataggtgtcaaccgccagt

SEQ ID NO: 58282 - DNA, 20 bp, synthetic construct
  misc_feature 1..20: note = chemically synthesized
  source 1..20: mol_type = other DNA
tgccttttatcccgtgatgg

SEQ ID NO: 58283 - DNA, 20 bp, synthetic construct
  misc_feature 1..20: note = chemically synthesized
  source 1..20: mol_type = other DNA
ttcaatggagatcagatgtt

SEQ ID NO: 58284 - DNA, 20 bp, synthetic construct
  misc_feature 1..20: note = chemically synthesized
  source 1..20: mol_type = other DNA
cacttcatctttttattttt

SEQ ID NO: 58285 - DNA, 20 bp, synthetic construct
  misc_feature 1..20: note = chemically synthesized
  source 1..20: mol_type = other DNA
tattttttagaatcatgcgg

SEQ ID NO: 58286 - DNA, 20 bp, synthetic construct
  misc_feature 1..20: note = chemically synthesized
  source 1..20: mol_type = other DNA
ggcaggcagatcatgaggtc

SEQ ID NO: 58287 - DNA, 20 bp, synthetic construct
  misc_feature 1..20: note = chemically synthesized
  source 1..20: mol_type = other DNA
tacttgggaggctgaggcag

SEQ ID NO: 58288 - DNA, 20 bp, synthetic construct
  misc_feature 1..20: note = chemically synthesized
  source 1..20: mol_type = other DNA
aaagaaagaaagaaagtggc

SEQ ID NO: 58289 - DNA, 20 bp, synthetic construct
  misc_feature 1..20: note = chemically synthesized
  source 1..20: mol_type = other DNA
agaaagaaagtggccagaat

SEQ ID NO: 58290 - DNA, 20 bp, synthetic construct
  misc_feature 1..20: note = chemically synthesized
  source 1..20: mol_type = other DNA
gggctttcccctgctcccca

SEQ ID NO: 58291 - DNA, 20 bp, synthetic construct
  misc_feature 1..20: note = chemically synthesized
  source 1..20: mol_type = other DNA
ttgccaaggacatgtagttg

SEQ ID NO: 58292 - DNA, 20 bp, synthetic construct
  misc_feature 1..20: note = chemically synthesized
  source 1..20: mol_type = other DNA
gagggctggagcccagttcc

SEQ ID NO: 58293 - DNA, 20 bp, synthetic construct
  misc_feature 1..20: note = chemically synthesized
  source 1..20: mol_type = other DNA
ttaccccacaaaacaggctg

SEQ ID NO: 58294 - DNA, 20 bp, synthetic construct
  misc_feature 1..20: note = chemically synthesized
  source 1..20: mol_type = other DNA
tcttttttttttttttgaga

SEQ ID NO: 58295 - DNA, 20 bp, synthetic construct
  misc_feature 1..20: note = chemically synthesized
  source 1..20: mol_type = other DNA
tcttactctgttgcccaggc

SEQ ID NO: 58296 - DNA, 20 bp, synthetic construct
  misc_feature 1..20: note = chemically synthesized
  source 1..20: mol_type = other DNA
ccgcctctcacctcagcctc

SEQ ID NO: 58297 - DNA, 20 bp, synthetic construct
  misc_feature 1..20: note = chemically synthesized
  source 1..20: mol_type = other DNA
tcgtaatgtttttgtagaga

SEQ ID NO: 58298 - DNA, 20 bp, synthetic construct
  misc_feature 1..20: note = chemically synthesized
  source 1..20: mol_type = other DNA
cccaggctggtcttgaactc

SEQ ID NO: 58299 - DNA, 20 bp, synthetic construct
  misc_feature 1..20: note = chemically synthesized
  source 1..20: mol_type = other DNA
ttgaactcctgagttcaccc

SEQ ID NO: 58300 - DNA, 20 bp, synthetic construct
  misc_feature 1..20: note = chemically synthesized
  source 1..20: mol_type = other DNA
acctcggcctcccaaagtgc

SEQ ID NO: 58301 - DNA, 20 bp, synthetic construct
  misc_feature 1..20: note = chemically synthesized
  source 1..20: mol_type = other DNA
ctgtattttcaactcactgg

SEQ ID NO: 58302 - DNA, 20 bp, synthetic construct
  misc_feature 1..20: note = chemically synthesized
  source 1..20: mol_type = other DNA
gatgatccaaagtcagagag

SEQ ID NO: 58303 - DNA, 20 bp, synthetic construct
  misc_feature 1..20: note = chemically synthesized
  source 1..20: mol_type = other DNA
cagagagaggggttggaagc

SEQ ID NO: 58304 - DNA, 20 bp, synthetic construct
  misc_feature 1..20: note = chemically synthesized
  source 1..20: mol_type = other DNA
catgagtagcccgtggcttc

SEQ ID NO: 58305 - DNA, 20 bp, synthetic construct
  misc_feature 1..20: note = chemically synthesized
  source 1..20: mol_type = other DNA
gatggacagacattgcgaga

SEQ ID NO: 58306 - DNA, 20 bp, synthetic construct
  misc_feature 1..20: note = chemically synthesized
  source 1..20: mol_type = other DNA
ctccaatcacagctacccaa

SEQ ID NO: 58307 - DNA, 20 bp, synthetic construct
  misc_feature 1..20: note = chemically synthesized
  source 1..20: mol_type = other DNA
caccaagatgaaccagtcct

SEQ ID NO: 58308 - DNA, 20 bp, synthetic construct
  misc_feature 1..20: note = chemically synthesized
  source 1..20: mol_type = other DNA
acctggaggtaatgtgttga

SEQ ID NO: 58309 - DNA, 20 bp, synthetic construct
  misc_feature 1..20: note = chemically synthesized
  source 1..20: mol_type = other DNA
ttggtggtgattgctctgct

SEQ ID NO: 58310 - DNA, 20 bp, synthetic construct
  misc_feature 1..20: note = chemically synthesized
  source 1..20: mol_type = other DNA
taggttgatgcaaacatgtt

SEQ ID NO: 58311 - DNA, 20 bp, synthetic construct
  misc_feature 1..20: note = chemically synthesized
  source 1..20: mol_type = other DNA
ggcatgcttcttggcagtgc

SEQ ID NO: 58312 - DNA, 20 bp, synthetic construct
  misc_feature 1..20: note = chemically synthesized
  source 1..20: mol_type = other DNA
accaggccagagacacagga

SEQ ID NO: 58313 - DNA, 20 bp, synthetic construct
  misc_feature 1..20: note = chemically synthesized
  source 1..20: mol_type = other DNA
aatttgggaggctgaggtgg

SEQ ID NO: 58314 - DNA, 20 bp, synthetic construct
  misc_feature 1..20: note = chemically synthesized
  source 1..20: mol_type = other DNA
tgggaggatcccttgaagcc

SEQ ID NO: 58315 - DNA, 20 bp, synthetic construct
  misc_feature 1..20: note = chemically synthesized
  source 1..20: mol_type = other DNA
tattcaggaggctgaggcag

SEQ ID NO: 58316 - DNA, 20 bp, synthetic construct
  misc_feature 1..20: note = chemically synthesized
  source 1..20: mol_type = other DNA
caggaggattgcttgagccc

SEQ ID NO: 58317 - DNA, 20 bp, synthetic construct
  misc_feature 1..20: note = chemically synthesized
  source 1..20: mol_type = other DNA
gattgcttgagcccaggagt

SEQ ID NO: 58318 - DNA, 20 bp, synthetic construct
  misc_feature 1..20: note = chemically synthesized
  source 1..20: mol_type = other DNA
tggtctttccttaactgtat

SEQ ID NO: 58319 - DNA, 20 bp, synthetic construct
  misc_feature 1..20: note = chemically synthesized
  source 1..20: mol_type = other DNA
tccttaactgtattagagtc

SEQ ID NO: 58320 - DNA, 20 bp, synthetic construct
  misc_feature 1..20: note = chemically synthesized
  source 1..20: mol_type = other DNA
gggccagaaagtaatcgttt

SEQ ID NO: 58321 - DNA, 20 bp, synthetic construct
  misc_feature 1..20: note = chemically synthesized
  source 1..20: mol_type = other DNA
tctctctcttttttttgaaa

SEQ ID NO: 58322 - DNA, 20 bp, synthetic construct
  misc_feature 1..20: note = chemically synthesized
  source 1..20: mol_type = other DNA
tctcactctgtctcccaggc

SEQ ID NO: 58323 - DNA, 20 bp, synthetic construct
  misc_feature 1..20: note = chemically synthesized
  source 1..20: mol_type = other DNA
gatcctcccacctcagcctc

SEQ ID NO: 58324 - DNA, 20 bp, synthetic construct
  misc_feature 1..20: note = chemically synthesized
  source 1..20: mol_type = other DNA
ttttctatcttttgtagaga

SEQ ID NO: 58325 - DNA, 20 bp, synthetic construct
  misc_feature 1..20: note = chemically synthesized
  source 1..20: mol_type = other DNA
ccatgttgcccaggctggtc

SEQ ID NO: 58326 - DNA, 20 bp, synthetic construct
  misc_feature 1..20: note = chemically synthesized
  source 1..20: mol_type = other DNA
gtcttggcttcccaaagctc

SEQ ID NO: 58327 - DNA, 20 bp, synthetic construct
  misc_feature 1..20: note = chemically synthesized
  source 1..20: mol_type = other DNA
tcatacgtttaagcaaaata

SEQ ID NO: 58328 - DNA, 20 bp, synthetic construct
  misc_feature 1..20: note = chemically synthesized
  source 1..20: mol_type = other DNA
tcttactgtgcaacaatatg

SEQ ID NO: 58329 - DNA, 20 bp, synthetic construct
  misc_feature 1..20: note = chemically synthesized
  source 1..20: mol_type = other DNA
atgaatgtatggttccaaat

SEQ ID NO: 58330 - DNA, 20 bp, synthetic construct
  misc_feature 1..20: note = chemically synthesized
  source 1..20: mol_type = other DNA
aaatggtaactggagactta

SEQ ID NO: 58331 - DNA, 20 bp, synthetic construct
  misc_feature 1..20: note = chemically synthesized
  source 1..20: mol_type = other DNA
agagaccaaaaccctaacac

SEQ ID NO: 58332 - DNA, 20 bp, synthetic construct
  misc_feature 1..20: note = chemically synthesized
  source 1..20: mol_type = other DNA
gaggactgtgaaaggaacca

SEQ ID NO: 58333 - DNA, 20 bp, synthetic construct
  misc_feature 1..20: note = chemically synthesized
  source 1..20: mol_type = other DNA
actgtgaaaggaaccaggga

SEQ ID NO: 58334 - DNA, 20 bp, synthetic construct
  misc_feature 1..20: note = chemically synthesized
  source 1..20: mol_type = other DNA
tttatttatttttgtagaaa

SEQ ID NO: 58335 - DNA, 20 bp, synthetic construct
  misc_feature 1..20: note = chemically synthesized
  source 1..20: mol_type = other DNA
gcctcaacctagcaaagcat

SEQ ID NO: 58336 - DNA, 20 bp, synthetic construct
  misc_feature 1..20: note = chemically synthesized
  source 1..20: mol_type = other DNA
tccaaattcatgcatttttt

SEQ ID NO: 58337 - DNA, 20 bp, synthetic construct
  misc_feature 1..20: note = chemically synthesized
  source 1..20: mol_type = other DNA
ttttgaggataagagccagg

SEQ ID NO: 58338 - DNA, 20 bp, synthetic construct
  misc_feature 1..20: note = chemically synthesized
  source 1..20: mol_type = other DNA
taaaatgtttaaaaacttgc

SEQ ID NO: 58339 - DNA, 20 bp, synthetic construct
  misc_feature 1..20: note = chemically synthesized
  source 1..20: mol_type = other DNA
taagtccatattgacatgta

SEQ ID NO: 58340 - DNA, 20 bp, synthetic construct
  misc_feature 1..20: note = chemically synthesized
  source 1..20: mol_type = other DNA
aaaaaagaaactcagagcta

SEQ ID NO: 58341 - DNA, 20 bp, synthetic construct
  misc_feature 1..20: note = chemically synthesized
  source 1..20: mol_type = other DNA
atcctccaggaggtatgacc

SEQ ID NO: 58342 - DNA, 20 bp, synthetic construct
  misc_feature 1..20: note = chemically synthesized
  source 1..20: mol_type = other DNA
caggtaatgtgttggtgact

SEQ ID NO: 58343 - DNA, 20 bp, synthetic construct
  misc_feature 1..20: note = chemically synthesized
  source 1..20: mol_type = other DNA
taatgtgttggtgactgtgg

SEQ ID NO: 58344 - DNA, 20 bp, synthetic construct
  misc_feature 1..20: note = chemically synthesized
  source 1..20: mol_type = other DNA
tggcaggcagtgctggggcg

SEQ ID NO: 58345 - DNA, 20 bp, synthetic construct
  misc_feature 1..20: note = chemically synthesized
  source 1..20: mol_type = other DNA
acccagataagcctctgttg

SEQ ID NO: 58346 - DNA, 20 bp, synthetic construct
  misc_feature 1..20: note = chemically synthesized
  source 1..20: mol_type = other DNA
gtaactattgcagtgacctc

SEQ ID NO: 58347 - DNA, 20 bp, synthetic construct
  misc_feature 1..20: note = chemically synthesized
  source 1..20: mol_type = other DNA
attgcagtgacctctgggat

SEQ ID NO: 58348 - DNA, 20 bp, synthetic construct
  misc_feature 1..20: note = chemically synthesized
  source 1..20: mol_type = other DNA
gagagtttctatggtcagag

SEQ ID NO: 58349 - DNA, 20 bp, synthetic construct
  misc_feature 1..20: note = chemically synthesized
  source 1..20: mol_type = other DNA
atggtcagaggtgagtcaag

SEQ ID NO: 58350 - DNA, 20 bp, synthetic construct
  misc_feature 1..20: note = chemically synthesized
  source 1..20: mol_type = other DNA
acatatacaaaggccactgt

SEQ ID NO: 58351 - DNA, 20 bp, synthetic construct
  misc_feature 1..20: note = chemically synthesized
  source 1..20: mol_type = other DNA
atgccagggcagctagcagc

SEQ ID NO: 58352 - DNA, 20 bp, synthetic construct
  misc_feature 1..20: note = chemically synthesized
  source 1..20: mol_type = other DNA
gcagctagcagccagggtct

SEQ ID NO: 58353 - DNA, 20 bp, synthetic construct
  misc_feature 1..20: note = chemically synthesized
  source 1..20: mol_type = other DNA
gccagggtctctgagttggg

SEQ ID NO: 58354 - DNA, 20 bp, synthetic construct
  misc_feature 1..20: note = chemically synthesized
  source 1..20: mol_type = other DNA
gttttctgagacgcctcagg

SEQ ID NO: 58355 - DNA, 20 bp, synthetic construct
  misc_feature 1..20: note = chemically synthesized
  source 1..20: mol_type = other DNA
gcctcaggaagaatacccct

SEQ ID NO: 58356 - DNA, 20 bp, synthetic construct
  misc_feature 1..20: note = chemically synthesized
  source 1..20: mol_type = other DNA
gaagaatacccctatggata

SEQ ID NO: 58357 - DNA, 20 bp, synthetic construct
  misc_feature 1..20: note = chemically synthesized
  source 1..20: mol_type = other DNA
gataaggagttgataagtga

SEQ ID NO: 58358 - DNA, 20 bp, synthetic construct
  misc_feature 1..20: note = chemically synthesized
  source 1..20: mol_type = other DNA
tctgggcatccagggacagt

SEQ ID NO: 58359 - DNA, 20 bp, synthetic construct
  misc_feature 1..20: note = chemically synthesized
  source 1..20: mol_type = other DNA
ccaccaggcagggggaccct

SEQ ID NO: 58360 - DNA, 20 bp, synthetic construct
  misc_feature 1..20: note = chemically synthesized
  source 1..20: mol_type = other DNA
gctgactgcatcgagacacc

SEQ ID NO: 58361 - DNA, 20 bp, synthetic construct
  misc_feature 1..20: note = chemically synthesized
  source 1..20: mol_type = other DNA
cgtggattctcaaaggtctt

SEQ ID NO: 58362 - DNA, 20 bp, synthetic construct
  misc_feature 1..20: note = chemically synthesized
  source 1..20: mol_type = other DNA
aggtcttgtggatatatgag

SEQ ID NO: 58363 - DNA, 20 bp, synthetic construct
  misc_feature 1..20: note = chemically synthesized
  source 1..20: mol_type = other DNA
gagtggctagaagttttgct

SEQ ID NO: 58364 - DNA, 20 bp, synthetic construct
  misc_feature 1..20: note = chemically synthesized
  source 1..20: mol_type = other DNA
atttatctgtttatttgaga

SEQ ID NO: 58365 - DNA, 20 bp, synthetic construct
  misc_feature 1..20: note = chemically synthesized
  source 1..20: mol_type = other DNA
tctcactctgttacccaggc

SEQ ID NO: 58366 - DNA, 20 bp, synthetic construct
  misc_feature 1..20: note = chemically synthesized
  source 1..20: mol_type = other DNA
gcctcagtctcctgggctta

SEQ ID NO: 58367 - DNA, 20 bp, synthetic construct
  misc_feature 1..20: note = chemically synthesized
  source 1..20: mol_type = other DNA
ggatcgttttgcatcagtct

SEQ ID NO: 58368 - DNA, 20 bp, synthetic construct
  misc_feature 1..20: note = chemically synthesized
  source 1..20: mol_type = other DNA
tcatatatccacaagacctt

SEQ ID NO: 58369 - DNA, 20 bp, synthetic construct
  misc_feature 1..20: note = chemically synthesized
  source 1..20: mol_type = other DNA
ataaaaacgtgctggaggaa

SEQ ID NO: 58370 - DNA, 20 bp, synthetic construct
  misc_feature 1..20: note = chemically synthesized
  source 1..20: mol_type = other DNA
ggtattcttcctgaggcgtc

SEQ ID NO: 58371 - DNA, 20 bp, synthetic construct
  misc_feature 1..20: note = chemically synthesized
  source 1..20: mol_type = other DNA
accttgactcacctctgacc

SEQ ID NO: 58372 - DNA, 20 bp, synthetic construct
  misc_feature 1..20: note = chemically synthesized
  source 1..20: mol_type = other DNA
ggagaagtttgcttggacca

SEQ ID NO: 58373 - DNA, 20 bp, synthetic construct
  misc_feature 1..20: note = chemically synthesized
  source 1..20: mol_type = other DNA
tatatctacacacatatgta

SEQ ID NO: 58374 - DNA, 20 bp, synthetic construct
  misc_feature 1..20: note = chemically synthesized
  source 1..20: mol_type = other DNA
aaaccccatctctacaaaag

SEQ ID NO: 58375 - DNA, 20 bp, synthetic construct
  misc_feature 1..20: note = chemically synthesized
  source 1..20: mol_type = other DNA
ccctgtttcaaaaaaaagag

SEQ ID NO: 58376 - DNA, 20 bp, synthetic construct
  misc_feature 1..20: note = chemically synthesized
  source 1..20: mol_type = other DNA
aaagagagagaaaatttaaa

SEQ ID NO: 58377 - DNA, 20 bp, synthetic construct
  misc_feature 1..20: note = chemically synthesized
  source 1..20: mol_type = other DNA
acaattttttaaatttttgt

SEQ ID NO: 58378 - DNA, 20 bp, synthetic construct
  misc_feature 1..20: note = chemically synthesized
  source 1..20: mol_type = other DNA
aaataagtgcagttgcaggc

SEQ ID NO: 58379 - DNA, 20 bp, synthetic construct
  misc_feature 1..20: note = chemically synthesized
  source 1..20: mol_type = other DNA
tagaaaatctgacatctttg

SEQ ID NO: 58380 - DNA, 20 bp, synthetic construct
  misc_feature 1..20: note = chemically synthesized
  source 1..20: mol_type = other DNA
ccatatagagaggagatcag

SEQ ID NO: 58381 - DNA, 20 bp, synthetic construct
  misc_feature 1..20: note = chemically synthesized
  source 1..20: mol_type = other DNA
catctacataaagggggaag

SEQ ID NO: 58382 - DNA, 20 bp, synthetic construct
  misc_feature 1..20: note = chemically synthesized
  source 1..20: mol_type = other DNA
tgaagcagaagaggtaacat

SEQ ID NO: 58383 - DNA, 20 bp, synthetic construct
  misc_feature 1..20: note = chemically synthesized
  source 1..20: mol_type = other DNA
tgaggtagttactgctattt

SEQ ID NO: 58384 - DNA, 20 bp, synthetic construct
  misc_feature 1..20: note = chemically synthesized
  source 1..20: mol_type = other DNA
gtggctctccctgatttcgg

SEQ ID NO: 58385 - DNA, 20 bp, synthetic construct
  misc_feature 1..20: note = chemically synthesized
  source 1..20: mol_type = other DNA
ctaattctttatattttttg

SEQ ID NO: 58386 - DNA, 20 bp, synthetic construct
  misc_feature 1..20: note = chemically synthesized
  source 1..20: mol_type = other DNA
ccaccgcgcctgcctggagt

SEQ ID NO: 58387 - DNA, 20 bp, synthetic construct
  misc_feature 1..20: note = chemically synthesized
  source 1..20: mol_type = other DNA
aaagcattcattcagtaacc

SEQ ID NO: 58388 - DNA, 20 bp, synthetic construct
  misc_feature 1..20: note = chemically synthesized
  source 1..20: mol_type = other DNA
cgccctgcagcgctgtgtcc

SEQ ID NO: 58389 - DNA, 20 bp, synthetic construct
  misc_feature 1..20: note = chemically synthesized
  source 1..20: mol_type = other DNA
ctacctgggaggctgaggca

SEQ ID NO: 58390 - DNA, 20 bp, synthetic construct
  misc_feature 1..20: note = chemically synthesized
  source 1..20: mol_type = other DNA
ctactcaggaggctaaggca

SEQ ID NO: 58391 - DNA, 20 bp, synthetic construct
  misc_feature 1..20: note = chemically synthesized
  source 1..20: mol_type = other DNA
acacacacacacatataata

SEQ ID NO: 58392 - DNA, 20 bp, synthetic construct
  misc_feature 1..20: note = chemically synthesized
  source 1..20: mol_type = other DNA
aaaaaaaaaaagaagaagaa

SEQ ID NO: 58393 - DNA, 20 bp, synthetic construct
  misc_feature 1..20: note = chemically synthesized
  source 1..20: mol_type = other DNA
agaaggaccaaacatctttt

SEQ ID NO: 58394 - DNA, 20 bp, synthetic construct
  misc_feature 1..20: note = chemically synthesized
  source 1..20: mol_type = other DNA
ttaggtagagtagctaaggc

SEQ ID NO: 58395 - DNA, 20 bp, synthetic construct
  misc_feature 1..20: note = chemically synthesized
  source 1..20: mol_type = other DNA
ctacccaggaggctgcggca

SEQ ID NO: 58396 - DNA, 20 bp, synthetic construct
  misc_feature 1..20: note = chemically synthesized
  source 1..20: mol_type = other DNA
tgcactccagccttggtgac

SEQ ID NO: 58397 - DNA, 20 bp, synthetic construct
  misc_feature 1..20: note = chemically synthesized
  source 1..20: mol_type = other DNA
gaagggagggaggaaggaag

SEQ ID NO: 58398 - DNA, 20 bp, synthetic construct
  misc_feature 1..20: note = chemically synthesized
  source 1..20: mol_type = other DNA
ggagggaggaaggaagggag

SEQ ID NO: 58399 - DNA, 20 bp, synthetic construct
  misc_feature 1..20: note = chemically synthesized
  source 1..20: mol_type = other DNA
gaaggaggaagggagggagg

SEQ ID NO: 58400 - DNA, 20 bp, synthetic construct
  misc_feature 1..20: note = chemically synthesized
  source 1..20: mol_type = other DNA
atgccaggagaaggctgaga

SEQ ID NO: 58401 - DNA, 20 bp, synthetic construct
  misc_feature 1..20: note = chemically synthesized
  source 1..20: mol_type = other DNA
atctctcagggtagaggaat

SEQ ID NO: 58402 - DNA, 20 bp, synthetic construct
  misc_feature 1..20: note = chemically synthesized
  source 1..20: mol_type = other DNA
gtggtcagagtaggactcac

SEQ ID NO: 58403 - DNA, 20 bp, synthetic construct
  misc_feature 1..20: note = chemically synthesized
  source 1..20: mol_type = other DNA
ccatccaggttaaaataacc

SEQ ID NO: 58404 - DNA, 20 bp, synthetic construct
  misc_feature 1..20: note = chemically synthesized
  source 1..20: mol_type = other DNA
acagaagatattcctactac

SEQ ID NO: 58405 - DNA, 20 bp, synthetic construct
  misc_feature 1..20: note = chemically synthesized
  source 1..20: mol_type = other DNA
catttctgtgggttgaaagt

SEQ ID NO: 58406 - DNA, 20 bp, synthetic construct
  misc_feature 1..20: note = chemically synthesized
  source 1..20: mol_type = other DNA
ctataagagtgcccagatct

SEQ ID NO: 58407 - DNA, 20 bp, synthetic construct
  misc_feature 1..20: note = chemically synthesized
  source 1..20: mol_type = other DNA
gacaagatttaagttaagca

SEQ ID NO: 58408 - DNA, 20 bp, synthetic construct
  misc_feature 1..20: note = chemically synthesized
  source 1..20: mol_type = other DNA
ggaacatagcagcattcaaa

SEQ ID NO: 58409 - DNA, 20 bp, synthetic construct
  misc_feature 1..20: note = chemically synthesized
  source 1..20: mol_type = other DNA
cctgggaatgtttaggttag

SEQ ID NO: 58410 - DNA, 20 bp, synthetic construct
  misc_feature 1..20: note = chemically synthesized
  source 1..20: mol_type = other DNA
ttcatcacttactaactcct

SEQ ID NO: 58411 - DNA, 20 bp, synthetic construct
  misc_feature 1..20: note = chemically synthesized
  source 1..20: mol_type = other DNA
ctaactcctgcagaaagaac

SEQ ID NO: 58412 - DNA, 20 bp, synthetic construct
  misc_feature 1..20: note = chemically synthesized
  source 1..20: mol_type = other DNA
tccactcaggcattgctgtt

SEQ ID NO: 58413 - DNA, 20 bp, synthetic construct
  misc_feature 1..20: note = chemically synthesized
  source 1..20: mol_type = other DNA
agcatctataatgccagcct

SEQ ID NO: 58414 - DNA, 20 bp, synthetic construct
  misc_feature 1..20: note = chemically synthesized
  source 1..20: mol_type = other DNA
gtagacctcctgtggactct

SEQ ID NO: 58415 - DNA, 20 bp, synthetic construct
  misc_feature 1..20: note = chemically synthesized
  source 1..20: mol_type = other DNA
cccagaggtggtgcgagcag

SEQ ID NO: 58416 - DNA, 20 bp, synthetic construct
  misc_feature 1..20: note = chemically synthesized
  source 1..20: mol_type = other DNA
tgaaaagctaatgaagctat

SEQ ID NO: 58417 - DNA, 20 bp, synthetic construct
  misc_feature 1..20: note = chemically synthesized
  source 1..20: mol_type = other DNA
cccaggctggagatcctaac

SEQ ID NO: 58418 - DNA, 20 bp, synthetic construct
  misc_feature 1..20: note = chemically synthesized
  source 1..20: mol_type = other DNA
ctacctgtgttcattcttac

SEQ ID NO: 58419 - DNA, 20 bp, synthetic construct
  misc_feature 1..20: note = chemically synthesized
  source 1..20: mol_type = other DNA
gttcattcttaccgagaaaa

SEQ ID NO: 58420 - DNA, 20 bp, synthetic construct
  misc_feature 1..20: note = chemically synthesized
  source 1..20: mol_type = other DNA
ccaggctaatttttatattt

SEQ ID NO: 58421 - DNA, 20 bp, synthetic construct
  misc_feature 1..20: note = chemically synthesized
  source 1..20: mol_type = other DNA
cctgctcataacatctttga

SEQ ID NO: 58422 - DNA, 20 bp, synthetic construct
  misc_feature 1..20: note = chemically synthesized
  source 1..20: mol_type = other DNA
tattaaagcaacattttatt

SEQ ID NO: 58423 - DNA, 20 bp, synthetic construct
  misc_feature 1..20: note = chemically synthesized
  source 1..20: mol_type = other DNA
gcctgcattttccctttgga

SEQ ID NO: 58424 - DNA, 20 bp, synthetic construct
  misc_feature 1..20: note = chemically synthesized
  source 1..20: mol_type = other DNA
ggcccaaaatcagcatagaa

SEQ ID NO: 58425 - DNA, 20 bp, synthetic construct
  misc_feature 1..20: note = chemically synthesized
  source 1..20: mol_type = other DNA
cagaaagattcagagttggc

SEQ ID NO: 58426 - DNA, 20 bp, synthetic construct
  misc_feature 1..20: note = chemically synthesized
  source 1..20: mol_type = other DNA
caaggttttgggttatagtt

SEQ ID NO: 58427 - DNA, 20 bp, synthetic construct
  misc_feature 1..20: note = chemically synthesized
  source 1..20: mol_type = other DNA
ttgtgggaaccaggcccctc

SEQ ID NO: 58428 - DNA, 20 bp, synthetic construct
  misc_feature 1..20: note = chemically synthesized
  source 1..20: mol_type = other DNA
aatcaaatggtcccaaccag

SEQ ID NO: 58429 - DNA, 20 bp, synthetic construct
  misc_feature 1..20: note = chemically synthesized
  source 1..20: mol_type = other DNA
aaatggtcccaaccagggag

SEQ ID NO: 58430 - DNA, 20 bp, synthetic construct
  misc_feature 1..20: note = chemically synthesized
  source 1..20: mol_type = other DNA
gtgtgagccactgcgcttgg

SEQ ID NO: 58431 - DNA, 20 bp, synthetic construct
  misc_feature 1..20: note = chemically synthesized
  source 1..20: mol_type = other DNA
gaccaagtccaagatcctta

SEQ ID NO: 58432 - DNA, 20 bp, synthetic construct
  misc_feature 1..20: note = chemically synthesized
  source 1..20: mol_type = other DNA
atccttacaagaaaggtctg

SEQ ID NO: 58433 - DNA, 20 bp, synthetic construct
  misc_feature 1..20: note = chemically synthesized
  source 1..20: mol_type = other DNA
cctgaagtttatgaggttga

SEQ ID NO: 58434 - DNA, 20 bp, synthetic construct
  misc_feature 1..20: note = chemically synthesized
  source 1..20: mol_type = other DNA
agaggggttagtcatcttgt

SEQ ID NO: 58435 - DNA, 20 bp, synthetic construct
  misc_feature 1..20: note = chemically synthesized
  source 1..20: mol_type = other DNA
ctactcaggtggctgaggtg

SEQ ID NO: 58436 - DNA, 20 bp, synthetic construct
  misc_feature 1..20: note = chemically synthesized
  source 1..20: mol_type = other DNA
tgacagagtgagaccctgtc

SEQ ID NO: 58437 - DNA, 20 bp, synthetic construct
  misc_feature 1..20: note = chemically synthesized
  source 1..20: mol_type = other DNA
gttatagatttacgtccact

SEQ ID NO: 58438 - DNA, 20 bp, synthetic construct
  misc_feature 1..20: note = chemically synthesized
  source 1..20: mol_type = other DNA
tcatgttatggcataatttg

SEQ ID NO: 58439 - DNA, 20 bp, synthetic construct
  misc_feature 1..20: note = chemically synthesized
  source 1..20: mol_type = other DNA
atgcaattctattattgccc

SEQ ID NO: 58440 - DNA, 20 bp, synthetic construct
  misc_feature 1..20: note = chemically synthesized
  source 1..20: mol_type = other DNA
ggaatattacttgtccataa

SEQ ID NO: 58441 - DNA, 20 bp, synthetic construct
  misc_feature 1..20: note = chemically synthesized
  source 1..20: mol_type = other DNA
caaataggcaaatctatgag

SEQ ID NO: 58442 - DNA, 20 bp, synthetic construct
  misc_feature 1..20: note = chemically synthesized
  source 1..20: mol_type = other DNA
tctattttctttgggcaata

SEQ ID NO: 58443 - DNA, 20 bp, synthetic construct
  misc_feature 1..20: note = chemically synthesized
  source 1..20: mol_type = other DNA
gtataaataaagtacataga

SEQ ID NO: 58444 - DNA, 20 bp, synthetic construct
  misc_feature 1..20: note = chemically synthesized
  source 1..20: mol_type = other DNA
ctgagagcccaaatccagta

SEQ ID NO: 58445 - DNA, 20 bp, synthetic construct
  misc_feature 1..20: note = chemically synthesized
  source 1..20: mol_type = other DNA
gatgaaataaatctcttagc

SEQ ID NO: 58446 - DNA, 20 bp, synthetic construct
  misc_feature 1..20: note = chemically synthesized
  source 1..20: mol_type = other DNA
caaagggaaaatgcaggcac

SEQ ID NO: 58447 - DNA, 20 bp, synthetic construct
  misc_feature 1..20: note = chemically synthesized
  source 1..20: mol_type = other DNA
atttgtttagggaaacagag

SEQ ID NO: 58448 - DNA, 20 bp, synthetic construct
  misc_feature 1..20: note = chemically synthesized
  source 1..20: mol_type = other DNA
gagctagaaatttagttggg

SEQ ID NO: 58449 - DNA, 20 bp, synthetic construct
  misc_feature 1..20: note = chemically synthesized
  source 1..20: mol_type = other DNA
gaaatttagttgggccagaa

SEQ ID NO: 58450 - DNA, 20 bp, synthetic construct
  misc_feature 1..20: note = chemically synthesized
  source 1..20: mol_type = other DNA
ttggggggtaggtgggtggg

SEQ ID NO: 58451 - DNA, 20 bp, synthetic construct
  misc_feature 1..20: note = chemically synthesized
  source 1..20: mol_type = other DNA
ctactgaggaggctgagaca

SEQ ID NO: 58452 - DNA, 20 bp, synthetic construct
  misc_feature 1..20: note = chemically synthesized
  source 1..20: mol_type = other DNA
ataggtgcgccgtctcaaaa

SEQ ID NO: 58453 - DNA, 20 bp, synthetic construct
  misc_feature 1..20: note = chemically synthesized
  source 1..20: mol_type = other DNA
cgtctcaaaaaaagaaaaaa

SEQ ID NO: 58454 - DNA, 20 bp, synthetic construct
  misc_feature 1..20: note = chemically synthesized
  source 1..20: mol_type = other DNA
gaagatgttgacttttcctt

SEQ ID NO: 58455 - DNA, 20 bp, synthetic construct
  misc_feature 1..20: note = chemically synthesized
  source 1..20: mol_type = other DNA
gctcttggttggcttgggat

SEQ ID NO: 58456 - DNA, 20 bp, synthetic construct
  misc_feature 1..20: note = chemically synthesized
  source 1..20: mol_type = other DNA
gggtggatgtggagccagtg

SEQ ID NO: 58457 - DNA, 20 bp, synthetic construct
  misc_feature 1..20: note = chemically synthesized
  source 1..20: mol_type = other DNA
atctgggtcactgcagccat

SEQ ID NO: 58458 - DNA, 20 bp, synthetic construct
  misc_feature 1..20: note = chemically synthesized
  source 1..20: mol_type = other DNA
cagtaaaaaaaatactagaa

SEQ ID NO: 58459 - DNA, 20 bp, synthetic construct
  misc_feature 1..20: note = chemically synthesized
  source 1..20: mol_type = other DNA
ctcctttctccttttctcgg

SEQ ID NO: 58460 - DNA, 20 bp, synthetic construct
  misc_feature 1..20: note = chemically synthesized
  source 1..20: mol_type = other DNA
ctcggtaagaatgaacacag

SEQ ID NO: 58461 - DNA, 20 bp, synthetic construct
  misc_feature 1..20: note = chemically synthesized
  source 1..20: mol_type = other DNA
ttgcttttgtatatgtgacg

SEQ ID NO: 58462 - DNA, 20 bp, synthetic construct
  misc_feature 1..20: note = chemically synthesized
  source 1..20: mol_type = other DNA
cgtgatttaattccacgacg

SEQ ID NO: 58463 - DNA, 20 bp, synthetic construct
  misc_feature 1..20: note = chemically synthesized
  source 1..20: mol_type = other DNA
gctgaacaggaagaaggtaa

SEQ ID NO: 58464 - DNA, 20 bp, synthetic construct
  misc_feature 1..20: note = chemically synthesized
  source 1..20: mol_type = other DNA
gcaacagcaatgcctgagtg

SEQ ID NO: 58465 - DNA, 20 bp, synthetic construct
  misc_feature 1..20: note = chemically synthesized
  source 1..20: mol_type = other DNA
cgttcttacaaatctccagg

SEQ ID NO: 58466 - DNA, 20 bp, synthetic construct
  misc_feature 1..20: note = chemically synthesized
  source 1..20: mol_type = other DNA
ttacccttgttaattggatc

SEQ ID NO: 58467 - DNA, 20 bp, synthetic construct
  misc_feature 1..20: note = chemically synthesized
  source 1..20: mol_type = other DNA
tactcggagaggctgaggca

SEQ ID NO: 58468 - DNA, 20 bp, synthetic construct
  misc_feature 1..20: note = chemically synthesized
  source 1..20: mol_type = other DNA
tagggcctgttgaagaccag

SEQ ID NO: 58469 - DNA, 20 bp, synthetic construct
  misc_feature 1..20: note = chemically synthesized
  source 1..20: mol_type = other DNA
ctatagatctgggcactctt

SEQ ID NO: 58470 - DNA, 20 bp, synthetic construct
  misc_feature 1..20: note = chemically synthesized
  source 1..20: mol_type = other DNA
tcattcttgactttcaaccc

SEQ ID NO: 58471 - DNA, 20 bp, synthetic construct
  misc_feature 1..20: note = chemically synthesized
  source 1..20: mol_type = other DNA
ggattttgtcctgattaggg

SEQ ID NO: 58472 - DNA, 20 bp, synthetic construct
  misc_feature 1..20: note = chemically synthesized
  source 1..20: mol_type = other DNA
cagacattcagctgcacagc

SEQ ID NO: 58473 - DNA, 20 bp, synthetic construct
  misc_feature 1..20: note = chemically synthesized
  source 1..20: mol_type = other DNA
acaggtgcagatccttcagc

SEQ ID NO: 58474 - DNA, 20 bp, synthetic construct
  misc_feature 1..20: note = chemically synthesized
  source 1..20: mol_type = other DNA
cagcaaagaaaacagcccct

SEQ ID NO: 58475 - DNA, 20 bp, synthetic construct
  misc_feature 1..20: note = chemically synthesized
  source 1..20: mol_type = other DNA
ctatttgagaggctgaggca

SEQ ID NO: 58476 - DNA, 20 bp, synthetic construct
  misc_feature 1..20: note = chemically synthesized
  source 1..20: mol_type = other DNA
ctactcggtaggctgaggca

SEQ ID NO: 58477 - DNA, 20 bp, synthetic construct
  misc_feature 1..20: note = chemically synthesized
  source 1..20: mol_type = other DNA
tctgtctctacaaaaagata

SEQ ID NO: 58478 - DNA, 20 bp, synthetic construct
  misc_feature 1..20: note = chemically synthesized
  source 1..20: mol_type = other DNA
gcgggctagggggatgtgag

SEQ ID NO: 58479 - DNA, 20 bp, synthetic construct
  misc_feature 1..20: note = chemically synthesized
  source 1..20: mol_type = other DNA
ggctccctaaagggcaggaa

SEQ ID NO: 58480 - DNA, 20 bp, synthetic construct
  misc_feature 1..20: note = chemically synthesized
  source 1..20: mol_type = other DNA
atacagtctggagattacac

SEQ ID NO: 58481 - DNA, 20 bp, synthetic construct
  misc_feature 1..20: note = chemically synthesized
  source 1..20: mol_type = other DNA
agcccttcacagctcttctg

SEQ ID NO: 58482 - DNA, 20 bp, synthetic construct
  misc_feature 1..20: note = chemically synthesized
  source 1..20: mol_type = other DNA
tcgctgtggggttggatgag

SEQ ID NO: 58483 - DNA, 20 bp, synthetic construct
  misc_feature 1..20: note = chemically synthesized
  source 1..20: mol_type = other DNA
acttttttttttttttcctg

SEQ ID NO: 58484 - DNA, 20 bp, synthetic construct
  misc_feature 1..20: note = chemically synthesized
  source 1..20: mol_type = other DNA
tgtgcctccattaatttcag

SEQ ID NO: 58485 - DNA, 20 bp, synthetic construct
  misc_feature 1..20: note = chemically synthesized
  source 1..20: mol_type = other DNA
ccagtatggacgctgtccaa

SEQ ID NO: 58486 - DNA, 20 bp, synthetic construct
  misc_feature 1..20: note = chemically synthesized
  source 1..20: mol_type = other DNA
ccgtttctaccaaaaaatat

SEQ ID NO: 58487 - DNA, 20 bp, synthetic construct
  misc_feature 1..20: note = chemically synthesized
  source 1..20: mol_type = other DNA
ctactcgggaggctaaggca

SEQ ID NO: 58488 - DNA, 20 bp, synthetic construct
  misc_feature 1..20: note = chemically synthesized
  source 1..20: mol_type = other DNA
ctcaagaagtatttgtcctg

SEQ ID NO: 58489 - DNA, 20 bp, synthetic construct
  misc_feature 1..20: note = chemically synthesized
  source 1..20: mol_type = other DNA
cttgcatttcctctgacatc

SEQ ID NO: 58490 - DNA, 20 bp, synthetic construct
  misc_feature 1..20: note = chemically synthesized
  source 1..20: mol_type = other DNA
aaacatggcctgcatttcca

SEQ ID NO: 58491 - DNA, 20 bp, synthetic construct
  misc_feature 1..20: note = chemically synthesized
  source 1..20: mol_type = other DNA
acacttcatctttttatttt

SEQ ID NO: 58492 - DNA, 20 bp, synthetic construct
  misc_feature 1..20: note = chemically synthesized
  source 1..20: mol_type = other DNA
ctacttgggaggctgaggca

SEQ ID NO: 58493 - DNA, 20 bp, synthetic construct
  misc_feature 1..20: note = chemically synthesized
  source 1..20: mol_type = other DNA
ccatctcaaacaaacaaaca

SEQ ID NO: 58494 - DNA, 20 bp, synthetic construct
  misc_feature 1..20: note = chemically synthesized
  source 1..20: mol_type = other DNA
ctcaaacaaacaaacaaaag

SEQ ID NO: 58495 - DNA, 20 bp, synthetic construct
  misc_feature 1..20: note = chemically synthesized
  source 1..20: mol_type = other DNA
aacaaacaaacaaaagaaag

SEQ ID NO: 58496 - DNA, 20 bp, synthetic construct
  misc_feature 1..20: note = chemically synthesized
  source 1..20: mol_type = other DNA
aacaaacaaaagaaagaaag

SEQ ID NO: 58497 - DNA, 20 bp, synthetic construct
  misc_feature 1..20: note = chemically synthesized
  source 1..20: mol_type = other DNA
gaaagaaagaaagaaagtgg

SEQ ID NO: 58498 - DNA, 20 bp, synthetic construct
  misc_feature 1..20: note = chemically synthesized
  source 1..20: mol_type = other DNA
agaatgggaatgtttacgtg

SEQ ID NO: 58499 - DNA, 20 bp, synthetic construct
  misc_feature 1..20: note = chemically synthesized
  source 1..20: mol_type = other DNA
taaatagcagtaactacctc

SEQ ID NO: 58500 - DNA, 20 bp, synthetic construct
  misc_feature 1..20: note = chemically synthesized
  source 1..20: mol_type = other DNA
acctatttgtagattataaa

SEQ ID NO: 58501 - DNA, 20 bp, synthetic construct
  misc_feature 1..20: note = chemically synthesized
  source 1..20: mol_type = other DNA
ttcagggtgatttacgtaaa

SEQ ID NO: 58502 - DNA, 20 bp, synthetic construct
  misc_feature 1..20: note = chemically synthesized
  source 1..20: mol_type = other DNA
aactgcacttatttggggac

SEQ ID NO: 58503 - DNA, 20 bp, synthetic construct
  misc_feature 1..20: note = chemically synthesized
  source 1..20: mol_type = other DNA
aaacaaaacaaaacaaaaca

SEQ ID NO: 58504 - DNA, 20 bp, synthetic construct
  misc_feature 1..20: note = chemically synthesized
  source 1..20: mol_type = other DNA
tggcctcatgtctcttaggg

SEQ ID NO: 58505 - DNA, 20 bp, synthetic construct
  misc_feature 1..20: note = chemically synthesized
  source 1..20: mol_type = other DNA
gatgaatgtatggttccaaa

SEQ ID NO: 58506 - DNA, 20 bp, synthetic construct
  misc_feature 1..20: note = chemically synthesized
  source 1..20: mol_type = other DNA
catatgtgtgtagatataca

SEQ ID NO: 58507 - DNA, 20 bp, synthetic construct
  misc_feature 1..20: note = chemically synthesized
  source 1..20: mol_type = other DNA
ttatttatttatttattttt

SEQ ID NO: 58508 - DNA, 20 bp, synthetic construct
  misc_feature 1..20: note = chemically synthesized
  source 1..20: mol_type = other DNA
catgtaaggggtagctgggg

SEQ ID NO: 58509 - DNA, 20 bp, synthetic construct
  misc_feature 1..20: note = chemically synthesized
  source 1..20: mol_type = other DNA
ggggtagctggggacagaaa

SEQ ID NO: 58510 - DNA, 20 bp, synthetic construct
  misc_feature 1..20: note = chemically synthesized
  source 1..20: mol_type = other DNA
tgttttctgagacgcctcag

SEQ ID NO: 58511 - DNA, 20 bp, synthetic construct
  misc_feature 1..20: note = chemically synthesized
  source 1..20: mol_type = other DNA
acaggtgaggccccagcttg

SEQ ID NO: 58512 - DNA, 20 bp, synthetic construct
  misc_feature 1..20: note = chemically synthesized
  source 1..20: mol_type = other DNA
cgagtggctagaagttttgc

SEQ ID NO: 58513 - DNA, 20 bp, synthetic construct
  misc_feature 1..20: note = chemically synthesized
  source 1..20: mol_type = other DNA
cagctacccagagactgatg

SEQ ID NO: 58514 - DNA, 20 bp, synthetic construct
  misc_feature 1..20: note = chemically synthesized
  source 1..20: mol_type = other DNA
ataaatgagtggattctcag

SEQ ID NO: 58515 - DNA, 20 bp, synthetic construct
  misc_feature 1..20: note = chemically synthesized
  source 1..20: mol_type = other DNA
tcacctgttttcccacggat

SEQ ID NO: 58516 - DNA, 20 bp, synthetic construct
  misc_feature 1..20: note = chemically synthesized
  source 1..20: mol_type = other DNA
attcttcctgaggcgtctca

SEQ ID NO: 58517 - DNA, 20 bp, synthetic construct
  misc_feature 1..20: note = chemically synthesized
  source 1..20: mol_type = other DNA
ttttgcttaaacgtatgagt

SEQ ID NO: 58518 - DNA, 20 bp, synthetic construct
  misc_feature 1..20: note = chemically synthesized
  source 1..20: mol_type = other DNA
gaccagcctgggcaacatgg

SEQ ID NO: 58519 - DNA, 20 bp, synthetic construct
  misc_feature 1..20: note = chemically synthesized
  source 1..20: mol_type = other DNA
gagagagaaaatttaaaaaa

SEQ ID NO: 58520 - DNA, 20 bp, synthetic construct
  misc_feature 1..20: note = chemically synthesized
  source 1..20: mol_type = other DNA
atgaattaatcactgcattc

SEQ ID NO: 58521 - DNA, 20 bp, synthetic construct
  misc_feature 1..20: note = chemically synthesized
  source 1..20: mol_type = other DNA
gggtacaccatcacacacac

SEQ ID NO: 58522 - DNA, 20 bp, synthetic construct
  misc_feature 1..20: note = chemically synthesized
  source 1..20: mol_type = other DNA
taattttaaaattaagaact

SEQ ID NO: 58523 - DNA, 20 bp, synthetic construct
  misc_feature 1..20: note = chemically synthesized
  source 1..20: mol_type = other DNA
aatactggatacagggcata

SEQ ID NO: 58524 - DNA, 20 bp, synthetic construct
  misc_feature 1..20: note = chemically synthesized
  source 1..20: mol_type = other DNA
tggcgaaactccatctctac

SEQ ID NO: 58525 - DNA, 20 bp, synthetic construct
  misc_feature 1..20: note = chemically synthesized
  source 1..20: mol_type = other DNA
cccgtctctactaaaaatac

SEQ ID NO: 58526 - DNA, 20 bp, synthetic construct
  misc_feature 1..20: note = chemically synthesized
  source 1..20: mol_type = other DNA
agagaccctttccctgaccc

SEQ ID NO: 58527 - DNA, 20 bp, synthetic construct
  misc_feature 1..20: note = chemically synthesized
  source 1..20: mol_type = other DNA
atcacctgaggtcaggagtt

SEQ ID NO: 58528 - DNA, 20 bp, synthetic construct
  misc_feature 1..20: note = chemically synthesized
  source 1..20: mol_type = other DNA
gaccagcctggccaacatgg

SEQ ID NO: 58529 - DNA, 20 bp, synthetic construct
  misc_feature 1..20: note = chemically synthesized
  source 1..20: mol_type = other DNA
cgtcactaataaaaaaatac

SEQ ID NO: 58530 - DNA, 20 bp, synthetic construct
  misc_feature 1..20: note = chemically synthesized
  source 1..20: mol_type = other DNA
attgcttgagcccaagagtt

SEQ ID NO: 58531 - DNA, 20 bp, synthetic construct
  misc_feature 1..20: note = chemically synthesized
  source 1..20: mol_type = other DNA
agttcaaaaccagcctgggc

SEQ ID NO: 58532 - DNA, 20 bp, synthetic construct
  misc_feature 1..20: note = chemically synthesized
  source 1..20: mol_type = other DNA
aaaacaatcaaacaaacaaa

SEQ ID NO: 58533 - DNA, 20 bp, synthetic construct
  misc_feature 1..20: note = chemically synthesized
  source 1..20: mol_type = other DNA
aagcaagacactgtctctaa

SEQ ID NO: 58534 - DNA, 20 bp, synthetic construct
  misc_feature 1..20: note = chemically synthesized
  source 1..20: mol_type = other DNA
acactgtctctaaaaaaaca

SEQ ID NO: 58535 - DNA, 20 bp, synthetic construct
  misc_feature 1..20: note = chemically synthesized
  source 1..20: mol_type = other DNA
aacaaaaaacaaacaaataa

SEQ ID NO: 58536 - DNA, 20 bp, synthetic construct
  misc_feature 1..20: note = chemically synthesized
  source 1..20: mol_type = other DNA
agtagcagcagggcttaaat

SEQ ID NO: 58537 - DNA, 20 bp, synthetic construct
  misc_feature 1..20: note = chemically synthesized
  source 1..20: mol_type = other DNA
actggaatataagaccttaa

SEQ ID NO: 58538 - DNA, 20 bp, synthetic construct
  misc_feature 1..20: note = chemically synthesized
  source 1..20: mol_type = other DNA
cctggaagccatatcacatg

SEQ ID NO: 58539 - DNA, 20 bp, synthetic construct
  misc_feature 1..20: note = chemically synthesized
  source 1..20: mol_type = other DNA
acccagatattgcactaggt

SEQ ID NO: 58540 - DNA, 20 bp, synthetic construct
  misc_feature 1..20: note = chemically synthesized
  source 1..20: mol_type = other DNA
gtataccatacattatcatt

SEQ ID NO: 58541 - DNA, 20 bp, synthetic construct
  misc_feature 1..20: note = chemically synthesized
  source 1..20: mol_type = other DNA
gaagtttatgaggttgataa

SEQ ID NO: 58542 - DNA, 20 bp, synthetic construct
  misc_feature 1..20: note = chemically synthesized
  source 1..20: mol_type = other DNA
ccccgtctataccaaaaata

SEQ ID NO: 58543 - DNA, 20 bp, synthetic construct
  misc_feature 1..20: note = chemically synthesized
  source 1..20: mol_type = other DNA
ttataacacagataaacctt

SEQ ID NO: 58544 - DNA, 20 bp, synthetic construct
  misc_feature 1..20: note = chemically synthesized
  source 1..20: mol_type = other DNA
tgagtgggttggagtggaat

SEQ ID NO: 58545 - DNA, 20 bp, synthetic construct
  misc_feature 1..20: note = chemically synthesized
  source 1..20: mol_type = other DNA
ttacaattttgttaaaaatc

SEQ ID NO: 58546 - DNA, 20 bp, synthetic construct
  misc_feature 1..20: note = chemically synthesized
  source 1..20: mol_type = other DNA
aaaaagataaaataaataac

SEQ ID NO: 58547 - DNA, 20 bp, synthetic construct
  misc_feature 1..20: note = chemically synthesized
  source 1..20: mol_type = other DNA
aaataaataaccaaaaccac

SEQ ID NO: 58548 - DNA, 20 bp, synthetic construct
  misc_feature 1..20: note = chemically synthesized
  source 1..20: mol_type = other DNA
catcctcaagcctaccacct

SEQ ID NO: 58549 - DNA, 20 bp, synthetic construct
  misc_feature 1..20: note = chemically synthesized
  source 1..20: mol_type = other DNA
acatgacatggaccttgctt

SEQ ID NO: 58550 - DNA, 20 bp, synthetic construct
  misc_feature 1..20: note = chemically synthesized
  source 1..20: mol_type = other DNA
agggttcagttcagacagat

SEQ ID NO: 58551 - DNA, 20 bp, synthetic construct
  misc_feature 1..20: note = chemically synthesized
  source 1..20: mol_type = other DNA
gactttcttgaactataacc

SEQ ID NO: 58552 - DNA, 20 bp, synthetic construct
  misc_feature 1..20: note = chemically synthesized
  source 1..20: mol_type = other DNA
tatactatataattagtagc

SEQ ID NO: 58553 - DNA, 20 bp, synthetic construct
  misc_feature 1..20: note = chemically synthesized
  source 1..20: mol_type = other DNA
ctgcatatcagatgagattg

SEQ ID NO: 58554 - DNA, 20 bp, synthetic construct
  misc_feature 1..20: note = chemically synthesized
  source 1..20: mol_type = other DNA
tgcatgatacgccacatact

SEQ ID NO: 58555 - DNA, 20 bp, synthetic construct
  misc_feature 1..20: note = chemically synthesized
  source 1..20: mol_type = other DNA
aatagcttcattagcttttc

SEQ ID NO: 58556 - DNA, 20 bp, synthetic construct
  misc_feature 1..20: note = chemically synthesized
  source 1..20: mol_type = other DNA
cccttgttaattggatctaa

SEQ ID NO: 58557 - DNA, 20 bp, synthetic construct
  misc_feature 1..20: note = chemically synthesized
  source 1..20: mol_type = other DNA
gagactccatctcaaaaaaa

SEQ ID NO: 58558 - DNA, 20 bp, synthetic construct
  misc_feature 1..20: note = chemically synthesized
  source 1..20: mol_type = other DNA
ctcaaaaaaaaaaaacaaaa

SEQ ID NO: 58559 - DNA, 20 bp, synthetic construct
  misc_feature 1..20: note = chemically synthesized
  source 1..20: mol_type = other DNA
aaaacaaaaaaaaacatatt

SEQ ID NO: 58560 - DNA, 20 bp, synthetic construct
  misc_feature 1..20: note = chemically synthesized
  source 1..20: mol_type = other DNA
ggtgcagatccttcagcaaa

SEQ ID NO: 58561 - DNA, 20 bp, synthetic construct
  misc_feature 1..20: note = chemically synthesized
  source 1..20: mol_type = other DNA
tctagcctgggcaacaagag

SEQ ID NO: 58562 - DNA, 20 bp, synthetic construct
  misc_feature 1..20: note = chemically synthesized
  source 1..20: mol_type = other DNA
gggctttgtttccttatctg

SEQ ID NO: 58563 - DNA, 20 bp, synthetic construct
  misc_feature 1..20: note = chemically synthesized
  source 1..20: mol_type = other DNA
aaccatctggctgtaactaa

SEQ ID NO: 58564 - DNA, 20 bp, synthetic construct
  misc_feature 1..20: note = chemically synthesized
  source 1..20: mol_type = other DNA
ttgctgtagtagtcagtatc

SEQ ID NO: 58565 - DNA, 20 bp, synthetic construct
  misc_feature 1..20: note = chemically synthesized
  source 1..20: mol_type = other DNA
gtccaaagagaatcctatgg

SEQ ID NO: 58566 - DNA, 20 bp, synthetic construct
  misc_feature 1..20: note = chemically synthesized
  source 1..20: mol_type = other DNA
gataacctatttgtagatta

SEQ ID NO: 58567 - DNA, 20 bp, synthetic construct
  misc_feature 1..20: note = chemically synthesized
  source 1..20: mol_type = other DNA
ggtgacttttcattacccca

SEQ ID NO: 58568 - DNA, 20 bp, synthetic construct
  misc_feature 1..20: note = chemically synthesized
  source 1..20: mol_type = other DNA
cctcttctgcttcatactaa

SEQ ID NO: 58569 - DNA, 20 bp, synthetic construct
  misc_feature 1..20: note = chemically synthesized
  source 1..20: mol_type = other DNA
cagccctgatctttggactc

SEQ ID NO: 58570 - DNA, 20 bp, synthetic construct
  misc_feature 1..20: note = chemically synthesized
  source 1..20: mol_type = other DNA
gggtgatttacgtaaaatag

SEQ ID NO: 58571 - DNA, 20 bp, synthetic construct
  misc_feature 1..20: note = chemically synthesized
  source 1..20: mol_type = other DNA
aaatagaaaaacaggcacac

SEQ ID NO: 58572 - DNA, 20 bp, synthetic construct
  misc_feature 1..20: note = chemically synthesized
  source 1..20: mol_type = other DNA
tcgagcaagaccccagtctc

SEQ ID NO: 58573 - DNA, 20 bp, synthetic construct
  misc_feature 1..20: note = chemically synthesized
  source 1..20: mol_type = other DNA
caagaccccagtctctaaaa

SEQ ID NO: 58574 - DNA, 20 bp, synthetic construct
  misc_feature 1..20: note = chemically synthesized
  source 1..20: mol_type = other DNA
ccccagtctctaaaacaaaa

SEQ ID NO: 58575 - DNA, 20 bp, synthetic construct
  misc_feature 1..20: note = chemically synthesized
  source 1..20: mol_type = other DNA
gtctctaaaacaaaacaaaa

SEQ ID NO: 58576 - DNA, 20 bp, synthetic construct
  misc_feature 1..20: note = chemically synthesized
  source 1..20: mol_type = other DNA
taaaacaaaacaaaacaaaa

SEQ ID NO: 58577 - DNA, 20 bp, synthetic construct
  misc_feature 1..20: note = chemically synthesized
  source 1..20: mol_type = other DNA
caaaacaaaacaaaacaaaa

SEQ ID NO: 58578 - DNA, 20 bp, synthetic construct
  misc_feature 1..20: note = chemically synthesized
  source 1..20: mol_type = other DNA
aaaacaaaacaaaacaaaag

SEQ ID NO: 58579 - DNA, 20 bp, synthetic construct
  misc_feature 1..20: note = chemically synthesized
  source 1..20: mol_type = other DNA
cctacaaatagtagagagac

SEQ ID NO: 58580 - DNA, 20 bp, synthetic construct
  misc_feature 1..20: note = chemically synthesized
  source 1..20: mol_type = other DNA
ccagggggaataaaatgttt

SEQ ID NO: 58581 - DNA, 20 bp, synthetic construct
  misc_feature 1..20: note = chemically synthesized
  source 1..20: mol_type = other DNA
cattccatgctggaaatgat

SEQ ID NO: 58582 - DNA, 20 bp, synthetic construct
  misc_feature 1..20: note = chemically synthesized
  source 1..20: mol_type = other DNA
aggtgagtcaaggtgagtct

SEQ ID NO: 58583 - DNA, 20 bp, synthetic construct
  misc_feature 1..20: note = chemically synthesized
  source 1..20: mol_type = other DNA
cagcacgtttttatccgtgg

SEQ ID NO: 58584 - DNA, 20 bp, synthetic construct
  misc_feature 1..20: note = chemically synthesized
  source 1..20: mol_type = other DNA
ctcaaataaacagataaatg

SEQ ID NO: 58585 - DNA, 20 bp, synthetic construct
  misc_feature 1..20: note = chemically synthesized
  source 1..20: mol_type = other DNA
atccacggtgtctcgatgca

SEQ ID NO: 58586 - DNA, 20 bp, synthetic construct
  misc_feature 1..20: note = chemically synthesized
  source 1..20: mol_type = other DNA
ttctaacaagctggggcctc

SEQ ID NO: 58587 - DNA, 20 bp, synthetic construct
  misc_feature 1..20: note = chemically synthesized
  source 1..20: mol_type = other DNA
acccagacagtggcctttgt

SEQ ID NO: 58588 - DNA, 20 bp, synthetic construct
  misc_feature 1..20: note = chemically synthesized
  source 1..20: mol_type = other DNA
tgcaatagttactccacaac

SEQ ID NO: 58589 - DNA, 20 bp, synthetic construct
  misc_feature 1..20: note = chemically synthesized
  source 1..20: mol_type = other DNA
cccagcactgcctgccacgc

SEQ ID NO: 58590 - DNA, 20 bp, synthetic construct
  misc_feature 1..20: note = chemically synthesized
  source 1..20: mol_type = other DNA
ccaaggttaggcgtggcagg

SEQ ID NO: 58591 - DNA, 20 bp, synthetic construct
  misc_feature 1..20: note = chemically synthesized
  source 1..20: mol_type = other DNA
ggttaggcgtggcaggagaa

SEQ ID NO: 58592 - DNA, 20 bp, synthetic construct
  misc_feature 1..20: note = chemically synthesized
  source 1..20: mol_type = other DNA
tccaggtcatacctcctgga

SEQ ID NO: 58593 - DNA, 20 bp, synthetic construct
  misc_feature 1..20: note = chemically synthesized
  source 1..20: mol_type = other DNA
ggaatgctgtcaacttttgc

SEQ ID NO: 58594 - DNA, 20 bp, synthetic construct
  misc_feature 1..20: note = chemically synthesized
  source 1..20: mol_type = other DNA
ttgccacagattcattagct

SEQ ID NO: 58595 - DNA, 20 bp, synthetic construct
  misc_feature 1..20: note = chemically synthesized
  source 1..20: mol_type = other DNA
cttaatgatgggaaattcag

SEQ ID NO: 58596 - DNA, 20 bp, synthetic construct
  misc_feature 1..20: note = chemically synthesized
  source 1..20: mol_type = other DNA
gtggctcatgcctgtaatcc

SEQ ID NO: 58597 - DNA, 20 bp, synthetic construct
  misc_feature 1..20: note = chemically synthesized
  source 1..20: mol_type = other DNA
gcctgggccgcatagtgaga

SEQ ID NO: 58598 - DNA, 20 bp, synthetic construct
  misc_feature 1..20: note = chemically synthesized
  source 1..20: mol_type = other DNA
ataaataatagtgatatgaa

SEQ ID NO: 58599 - DNA, 20 bp, synthetic construct
  misc_feature 1..20: note = chemically synthesized
  source 1..20: mol_type = other DNA
ttaaaatgcatgagttcgtt

SEQ ID NO: 58600 - DNA, 20 bp, synthetic construct
  misc_feature 1..20: note = chemically synthesized
  source 1..20: mol_type = other DNA
gtcctccgtgacccaagtgt

SEQ ID NO: 58601 - DNA, 20 bp, synthetic construct
  misc_feature 1..20: note = chemically synthesized
  source 1..20: mol_type = other DNA
atacacacacacagtgtatc

SEQ ID NO: 58602 - DNA, 20 bp, synthetic construct
  misc_feature 1..20: note = chemically synthesized
  source 1..20: mol_type = other DNA
gccctttttcaaaaataact

SEQ ID NO: 58603 - DNA, 20 bp, synthetic construct
  misc_feature 1..20: note = chemically synthesized
  source 1..20: mol_type = other DNA
gtaagactatacattcatta

SEQ ID NO: 58604 - DNA, 20 bp, synthetic construct
  misc_feature 1..20: note = chemically synthesized
  source 1..20: mol_type = other DNA
gtggttcacacctgtaatcc

SEQ ID NO: 58605 - DNA, 20 bp, synthetic construct
  misc_feature 1..20: note = chemically synthesized
  source 1..20: mol_type = other DNA
gaggttgaggctgcagtgag

SEQ ID NO: 58606 - DNA, 20 bp, synthetic construct
  misc_feature 1..20: note = chemically synthesized
  source 1..20: mol_type = other DNA
gcctgggagacagagtgaga

SEQ ID NO: 58607 - DNA, 20 bp, synthetic construct
  misc_feature 1..20: note = chemically synthesized
  source 1..20: mol_type = other DNA
gaattaatcactgcattcaa

SEQ ID NO: 58608 - DNA, 20 bp, synthetic construct
  misc_feature 1..20: note = chemically synthesized
  source 1..20: mol_type = other DNA
agaagttactatattttatt

SEQ ID NO: 58609 - DNA, 20 bp, synthetic construct
  misc_feature 1..20: note = chemically synthesized
  source 1..20: mol_type = other DNA
tattttatttgttgtttttc

SEQ ID NO: 58610 - DNA, 20 bp, synthetic construct
  misc_feature 1..20: note = chemically synthesized
  source 1..20: mol_type = other DNA
tatttgttgtttttcttttg

SEQ ID NO: 58611 - DNA, 20 bp, synthetic construct
  misc_feature 1..20: note = chemically synthesized
  source 1..20: mol_type = other DNA
gttgtttttcttttgttttg

SEQ ID NO: 58612 - DNA, 20 bp, synthetic construct
  misc_feature 1..20: note = chemically synthesized
  source 1..20: mol_type = other DNA
ttttcttttgttttgttttg

SEQ ID NO: 58613 - DNA, 20 bp, synthetic construct
  misc_feature 1..20: note = chemically synthesized
  source 1..20: mol_type = other DNA
ttttgttttgttttgttttg

SEQ ID NO: 58614 - DNA, 20 bp, synthetic construct
  misc_feature 1..20: note = chemically synthesized
  source 1..20: mol_type = other DNA
ttttgttttgttttgttttg

SEQ ID NO: 58615 - DNA, 20 bp, synthetic construct
  misc_feature 1..20: note = chemically synthesized
  source 1..20: mol_type = other DNA
gttttagagactggggtctt

SEQ ID NO: 58616 - DNA, 20 bp, synthetic construct
  misc_feature 1..20: note = chemically synthesized
  source 1..20: mol_type = other DNA
tttttgtgtagaaacgaggg

SEQ ID NO: 58617 - DNA, 20 bp, synthetic construct
  misc_feature 1..20: note = chemically synthesized
  source 1..20: mol_type = other DNA
gcccaggctggtctccaact

SEQ ID NO: 58618 - DNA, 20 bp, synthetic construct
  misc_feature 1..20: note = chemically synthesized
  source 1..20: mol_type = other DNA
cacctcagcctcccaaattg

SEQ ID NO: 58619 - DNA, 20 bp, synthetic construct
  misc_feature 1..20: note = chemically synthesized
  source 1..20: mol_type = other DNA
aaacttgaatagctagagca

SEQ ID NO: 58620 - DNA, 20 bp, synthetic construct
  misc_feature 1..20: note = chemically synthesized
  source 1..20: mol_type = other DNA
actctgtcctgtgtctctgg

SEQ ID NO: 58621 - DNA, 20 bp, synthetic construct
  misc_feature 1..20: note = chemically synthesized
  source 1..20: mol_type = other DNA
gctgagtacatggccgatca

SEQ ID NO: 58622 - DNA, 20 bp, synthetic construct
  misc_feature 1..20: note = chemically synthesized
  source 1..20: mol_type = other DNA
cgatcaggctgtttttgtgt

SEQ ID NO: 58623 - DNA, 20 bp, synthetic construct
  misc_feature 1..20: note = chemically synthesized
  source 1..20: mol_type = other DNA
ttttacgtaaatcaccctga

SEQ ID NO: 58624 - DNA, 20 bp, synthetic construct
  misc_feature 1..20: note = chemically synthesized
  source 1..20: mol_type = other DNA
atcaatacattttagacaaa

SEQ ID NO: 58625 - DNA, 20 bp, synthetic construct
  misc_feature 1..20: note = chemically synthesized
  source 1..20: mol_type = other DNA
cattaaactcctttgggtag

SEQ ID NO: 58626 - DNA, 20 bp, synthetic construct
  misc_feature 1..20: note = chemically synthesized
  source 1..20: mol_type = other DNA
cgcaatgtctgtccatcaga

SEQ ID NO: 58627 - DNA, 20 bp, synthetic construct
  misc_feature 1..20: note = chemically synthesized
  source 1..20: mol_type = other DNA
ttcaggaagccacgggctac

SEQ ID NO: 58628 - DNA, 20 bp, synthetic construct
  misc_feature 1..20: note = chemically synthesized
  source 1..20: mol_type = other DNA
tcgtgaaaagtctgagttat

SEQ ID NO: 58629 - DNA, 20 bp, synthetic construct
  misc_feature 1..20: note = chemically synthesized
  source 1..20: mol_type = other DNA
agttatataggctttgagca

SEQ ID NO: 58630 - DNA, 20 bp, synthetic construct
  misc_feature 1..20: note = chemically synthesized
  source 1..20: mol_type = other DNA
tatgaaaaaaggaaacacac

SEQ ID NO: 58631 - DNA, 20 bp, synthetic construct
  misc_feature 1..20: note = chemically synthesized
  source 1..20: mol_type = other DNA
aacacacagatgattcaaca

SEQ ID NO: 58632 - DNA, 20 bp, synthetic construct
  misc_feature 1..20: note = chemically synthesized
  source 1..20: mol_type = other DNA
tggcaagtcatatcaattat

SEQ ID NO: 58633 - DNA, 20 bp, synthetic construct
  misc_feature 1..20: note = chemically synthesized
  source 1..20: mol_type = other DNA
gtcatatcaattatctgagt

SEQ ID NO: 58634 - DNA, 20 bp, synthetic construct
  misc_feature 1..20: note = chemically synthesized
  source 1..20: mol_type = other DNA
tctacaaataggttatctct

SEQ ID NO: 58635 - DNA, 20 bp, synthetic construct
  misc_feature 1..20: note = chemically synthesized
  source 1..20: mol_type = other DNA
tgtgtgccagtccatgtgct

SEQ ID NO: 58636 - DNA, 20 bp, synthetic construct
  misc_feature 1..20: note = chemically synthesized
  source 1..20: mol_type = other DNA
agagaccaaggtgctgagtt

SEQ ID NO: 58637 - DNA, 20 bp, synthetic construct
  misc_feature 1..20: note = chemically synthesized
  source 1..20: mol_type = other DNA
atggaagcccaggtaggcag

SEQ ID NO: 58638 - DNA, 20 bp, synthetic construct
  misc_feature 1..20: note = chemically synthesized
  source 1..20: mol_type = other DNA
ctggggagcaggggaaagcc

SEQ ID NO: 58639 - DNA, 20 bp, synthetic construct
  misc_feature 1..20: note = chemically synthesized
  source 1..20: mol_type = other DNA
ccactttctttctttctttc

SEQ ID NO: 58640 - DNA, 20 bp, synthetic construct
  misc_feature 1..20: note = chemically synthesized
  source 1..20: mol_type = other DNA
tttctttctttctttctttt

SEQ ID NO: 58641 - DNA, 20 bp, synthetic construct
  misc_feature 1..20: note = chemically synthesized
  source 1..20: mol_type = other DNA
tttctttctttcttttgttt

SEQ ID NO: 58642 - DNA, 20 bp, synthetic construct
  misc_feature 1..20: note = chemically synthesized
  source 1..20: mol_type = other DNA
aacctctgcctctccggttc

SEQ ID NO: 58643 - DNA, 20 bp, synthetic construct
  misc_feature 1..20: note = chemically synthesized
  source 1..20: mol_type = other DNA
tgcctcagcctcccaagtag

SEQ ID NO: 58644 - DNA, 20 bp, synthetic construct
  misc_feature 1..20: note = chemically synthesized
  source 1..20: mol_type = other DNA
ttttgtatttttagtagaga

SEQ ID NO: 58645 - DNA, 20 bp, synthetic construct
  misc_feature 1..20: note = chemically synthesized
  source 1..20: mol_type = other DNA
tgccttggcctccctaagtg

SEQ ID NO: 58646 - DNA, 20 bp, synthetic construct
  misc_feature 1..20: note = chemically synthesized
  source 1..20: mol_type = other DNA
gtgagccactacacccagcc

SEQ ID NO: 58647 - DNA, 20 bp, synthetic construct
  misc_feature 1..20: note = chemically synthesized
  source 1..20: mol_type = other DNA
aggccagagttagtggctct

SEQ ID NO: 58648 - DNA, 20 bp, synthetic construct
  misc_feature 1..20: note = chemically synthesized
  source 1..20: mol_type = other DNA
tctagtacttttaaagggga

SEQ ID NO: 58649 - DNA, 20 bp, synthetic construct
  misc_feature 1..20: note = chemically synthesized
  source 1..20: mol_type = other DNA
gaagtggtttgtctgagata

SEQ ID NO: 58650 - DNA, 20 bp, synthetic construct
  misc_feature 1..20: note = chemically synthesized
  source 1..20: mol_type = other DNA
aattctgatggaaatgcagg

SEQ ID NO: 58651 - DNA, 20 bp, synthetic construct
  misc_feature 1..20: note = chemically synthesized
  source 1..20: mol_type = other DNA
tctctgatgtcagaggaaat

SEQ ID NO: 58652 - DNA, 20 bp, synthetic construct
  misc_feature 1..20: note = chemically synthesized
  source 1..20: mol_type = other DNA
aacccatggtatatgcaagt

SEQ ID NO: 58653 - DNA, 20 bp, synthetic construct
  misc_feature 1..20: note = chemically synthesized
  source 1..20: mol_type = other DNA
aagtcacatagctgccattt

SEQ ID NO: 58654 - DNA, 20 bp, synthetic construct
  misc_feature 1..20: note = chemically synthesized
  source 1..20: mol_type = other DNA
tagctgccattttatggatt

SEQ ID NO: 58655 - DNA, 20 bp, synthetic construct
  misc_feature 1..20: note = chemically synthesized
  source 1..20: mol_type = other DNA
aacctccgcctcccaggttc

SEQ ID NO: 58656 - DNA, 20 bp, synthetic construct
  misc_feature 1..20: note = chemically synthesized
  source 1..20: mol_type = other DNA
tgccttagcctcccgagtag

SEQ ID NO: 58657 - DNA, 20 bp, synthetic construct
  misc_feature 1..20: note = chemically synthesized
  source 1..20: mol_type = other DNA
tttatattttttggtagaaa

SEQ ID NO: 58658 - DNA, 20 bp, synthetic construct
  misc_feature 1..20: note = chemically synthesized
  source 1..20: mol_type = other DNA
tgccttggcctcccaaagtg

SEQ ID NO: 58659 - DNA, 20 bp, synthetic construct
  misc_feature 1..20: note = chemically synthesized
  source 1..20: mol_type = other DNA
cctgcctggagttcagaatc

SEQ ID NO: 58660 - DNA, 20 bp, synthetic construct
  misc_feature 1..20: note = chemically synthesized
  source 1..20: mol_type = other DNA
agaatcttgggcttcattat

SEQ ID NO: 58661 - DNA, 20 bp, synthetic construct
  misc_feature 1..20: note = chemically synthesized
  source 1..20: mol_type = other DNA
cactttgggaggctgaggtg

SEQ ID NO: 58662 - DNA, 20 bp, synthetic construct
  misc_feature 1..20: note = chemically synthesized
  source 1..20: mol_type = other DNA
gaggtagaggtcacaatgag

SEQ ID NO: 58663 - DNA, 20 bp, synthetic construct
  misc_feature 1..20: note = chemically synthesized
  source 1..20: mol_type = other DNA
gctacactcttcttgaaggt

SEQ ID NO: 58664 - DNA, 20 bp, synthetic construct
  misc_feature 1..20: note = chemically synthesized
  source 1..20: mol_type = other DNA
tcagtaaccccagaaacttg

SEQ ID NO: 58665 - DNA, 20 bp, synthetic construct
  misc_feature 1..20: note = chemically synthesized
  source 1..20: mol_type = other DNA
gaaacttgttctgtttttcc

SEQ ID NO: 58666 - DNA, 20 bp, synthetic construct
  misc_feature 1..20: note = chemically synthesized
  source 1..20: mol_type = other DNA
tttggacagcgtccatactg

SEQ ID NO: 58667 - DNA, 20 bp, synthetic construct
  misc_feature 1..20: note = chemically synthesized
  source 1..20: mol_type = other DNA
gcagacagaagctgagtgga

SEQ ID NO: 58668 - DNA, 20 bp, synthetic construct
  misc_feature 1..20: note = chemically synthesized
  source 1..20: mol_type = other DNA
agaaaggagggggcagaagc

SEQ ID NO: 58669 - DNA, 20 bp, synthetic construct
  misc_feature 1..20: note = chemically synthesized
  source 1..20: mol_type = other DNA
atcccttgccctctctgtgc

SEQ ID NO: 58670 - DNA, 20 bp, synthetic construct
  misc_feature 1..20: note = chemically synthesized
  source 1..20: mol_type = other DNA
tggttactgtcaaatcaaat

SEQ ID NO: 58671 - DNA, 20 bp, synthetic construct
  misc_feature 1..20: note = chemically synthesized
  source 1..20: mol_type = other DNA
ctgggaggctgaggcaggag

SEQ ID NO: 58672 - DNA, 20 bp, synthetic construct
  misc_feature 1..20: note = chemically synthesized
  source 1..20: mol_type = other DNA
tcaggaggctaaggcaggag

SEQ ID NO: 58673 - DNA, 20 bp, synthetic construct
  misc_feature 1..20: note = chemically synthesized
  source 1..20: mol_type = other DNA
tgaacctgggaggtggtgag

SEQ ID NO: 58674 - DNA, 20 bp, synthetic construct
  misc_feature 1..20: note = chemically synthesized
  source 1..20: mol_type = other DNA
cacacacatataatactaga

SEQ ID NO: 58675 - DNA, 20 bp, synthetic construct
  misc_feature 1..20: note = chemically synthesized
  source 1..20: mol_type = other DNA
cacatataatactagaaaat

SEQ ID NO: 58676 - DNA, 20 bp, synthetic construct
  misc_feature 1..20: note = chemically synthesized
  source 1..20: mol_type = other DNA
accaaacatcttttgtagaa

SEQ ID NO: 58677 - DNA, 20 bp, synthetic construct
  misc_feature 1..20: note = chemically synthesized
  source 1..20: mol_type = other DNA
aacatcttttgtagaaatat

SEQ ID NO: 58678 - DNA, 20 bp, synthetic construct
  misc_feature 1..20: note = chemically synthesized
  source 1..20: mol_type = other DNA
aatatgtttgctttcatcat

SEQ ID NO: 58679 - DNA, 20 bp, synthetic construct
  misc_feature 1..20: note = chemically synthesized
  source 1..20: mol_type = other DNA
attaatggaggcacagactg

SEQ ID NO: 58680 - DNA, 20 bp, synthetic construct
  misc_feature 1..20: note = chemically synthesized
  source 1..20: mol_type = other DNA
gcacagactggaaagtttaa

SEQ ID NO: 58681 - DNA, 20 bp, synthetic construct
  misc_feature 1..20: note = chemically synthesized
  source 1..20: mol_type = other DNA
caggtggatcacctgaggtc

SEQ ID NO: 58682 - DNA, 20 bp, synthetic construct
  misc_feature 1..20: note = chemically synthesized
  source 1..20: mol_type = other DNA
actccagccttggtgacaga

SEQ ID NO: 58683 - DNA, 20 bp, synthetic construct
  misc_feature 1..20: note = chemically synthesized
  source 1..20: mol_type = other DNA
ttctgtcaggaaaaaaaaaa

SEQ ID NO: 58684 - DNA, 20 bp, synthetic construct
  misc_feature 1..20: note = chemically synthesized
  source 1..20: mol_type = other DNA
ccctggaaagcaggctgaaa

SEQ ID NO: 58685 - DNA, 20 bp, synthetic construct
  misc_feature 1..20: note = chemically synthesized
  source 1..20: mol_type = other DNA
tgaaatggagattcacgtgc

SEQ ID NO: 58686 - DNA, 20 bp, synthetic construct
  misc_feature 1..20: note = chemically synthesized
  source 1..20: mol_type = other DNA
gggcagaaggagaggtccgg

SEQ ID NO: 58687 - DNA, 20 bp, synthetic construct
  misc_feature 1..20: note = chemically synthesized
  source 1..20: mol_type = other DNA
actttgggaggccaagggta

SEQ ID NO: 58688 - DNA, 20 bp, synthetic construct
  misc_feature 1..20: note = chemically synthesized
  source 1..20: mol_type = other DNA
tgggaggccaagggtaggag

SEQ ID NO: 58689 - DNA, 20 bp, synthetic construct
  misc_feature 1..20: note = chemically synthesized
  source 1..20: mol_type = other DNA
ctactcagggggctgaggtg

SEQ ID NO: 58690 - DNA, 20 bp, synthetic construct
  misc_feature 1..20: note = chemically synthesized
  source 1..20: mol_type = other DNA
tcagggggctgaggtgggag

SEQ ID NO: 58691 - DNA, 20 bp, synthetic construct
  misc_feature 1..20: note = chemically synthesized
  source 1..20: mol_type = other DNA
gtcttcaaggatgtgaggaa

SEQ ID NO: 58692 - DNA, 20 bp, synthetic construct
  misc_feature 1..20: note = chemically synthesized
  source 1..20: mol_type = other DNA
gtgaagggctgtctggccag

SEQ ID NO: 58693 - DNA, 20 bp, synthetic construct
  misc_feature 1..20: note = chemically synthesized
  source 1..20: mol_type = other DNA
gcaaaagccctgaggtggga

SEQ ID NO: 58694 - DNA, 20 bp, synthetic construct
  misc_feature 1..20: note = chemically synthesized
  source 1..20: mol_type = other DNA
ctgaggtgggaacgtgtttg

SEQ ID NO: 58695 - DNA, 20 bp, synthetic construct
  misc_feature 1..20: note = chemically synthesized
  source 1..20: mol_type = other DNA
acagaagatgtggagggcag

SEQ ID NO: 58696 - DNA, 20 bp, synthetic construct
  misc_feature 1..20: note = chemically synthesized
  source 1..20: mol_type = other DNA
ttgtaattgtacgcccagta

SEQ ID NO: 58697 - DNA, 20 bp, synthetic construct
  misc_feature 1..20: note = chemically synthesized
  source 1..20: mol_type = other DNA
ctgcaagagcagggcccctc

SEQ ID NO: 58698 - DNA, 20 bp, synthetic construct
  misc_feature 1..20: note = chemically synthesized
  source 1..20: mol_type = other DNA
tgtattcccagagccttgca

SEQ ID NO: 58699 - DNA, 20 bp, synthetic construct
  misc_feature 1..20: note = chemically synthesized
  source 1..20: mol_type = other DNA
agggaaagataaagccgacc

SEQ ID NO: 58700 - DNA, 20 bp, synthetic construct
  misc_feature 1..20: note = chemically synthesized
  source 1..20: mol_type = other DNA
cgctcccacacctgggcagc

SEQ ID NO: 58701 - DNA, 20 bp, synthetic construct
  misc_feature 1..20: note = chemically synthesized
  source 1..20: mol_type = other DNA
ggataaacctcagagtcagg

SEQ ID NO: 58702 - DNA, 20 bp, synthetic construct
  misc_feature 1..20: note = chemically synthesized
  source 1..20: mol_type = other DNA
agggatccagtagtgcaatc

SEQ ID NO: 58703 - DNA, 20 bp, synthetic construct
  misc_feature 1..20: note = chemically synthesized
  source 1..20: mol_type = other DNA
ataaggtagtgaagtagcag

SEQ ID NO: 58704 - DNA, 20 bp, synthetic construct
  misc_feature 1..20: note = chemically synthesized
  source 1..20: mol_type = other DNA
gctggtcttgatctcaagca

SEQ ID NO: 58705 - DNA, 20 bp, synthetic construct
  misc_feature 1..20: note = chemically synthesized
  source 1..20: mol_type = other DNA
tgcctcagcctcctaaaata

SEQ ID NO: 58706 - DNA, 20 bp, synthetic construct
  misc_feature 1..20: note = chemically synthesized
  source 1..20: mol_type = other DNA
ccatctcgcctcactgcaac

SEQ ID NO: 58707 - DNA, 20 bp, synthetic construct
  misc_feature 1..20: note = chemically synthesized
  source 1..20: mol_type = other DNA
ttttttatttttagtagaga

SEQ ID NO: 58708 - DNA, 20 bp, synthetic construct
  misc_feature 1..20: note = chemically synthesized
  source 1..20: mol_type = other DNA
cgcctcagcctcccaaagtg

SEQ ID NO: 58709 - DNA, 20 bp, synthetic construct
  misc_feature 1..20: note = chemically synthesized
  source 1..20: mol_type = other DNA
ttttttttttttttttgaga

SEQ ID NO: 58710 - DNA, 20 bp, synthetic construct
  misc_feature 1..20: note = chemically synthesized
  source 1..20: mol_type = other DNA
tgcctcagcctctcaaatag

SEQ ID NO: 58711 - DNA, 20 bp, synthetic construct
  misc_feature 1..20: note = chemically synthesized
  source 1..20: mol_type = other DNA
aattttttttttagtagaga

SEQ ID NO: 58712 - DNA, 20 bp, synthetic construct
  misc_feature 1..20: note = chemically synthesized
  source 1..20: mol_type = other DNA
cacctcggcctcccaaagtg

SEQ ID NO: 58713 - DNA, 20 bp, synthetic construct
  misc_feature 1..20: note = chemically synthesized
  source 1..20: mol_type = other DNA
cacctcggcctcccaaagta

SEQ ID NO: 58714 - DNA, 20 bp, synthetic construct
  misc_feature 1..20: note = chemically synthesized
  source 1..20: mol_type = other DNA
gcatctttggacttttgagt

SEQ ID NO: 58715 - DNA, 20 bp, synthetic construct
  misc_feature 1..20: note = chemically synthesized
  source 1..20: mol_type = other DNA
aaaaattccactgagagcac

SEQ ID NO: 58716 - DNA, 20 bp, synthetic construct
  misc_feature 1..20: note = chemically synthesized
  source 1..20: mol_type = other DNA
ggctccaacatttctgcagg

SEQ ID NO: 58717 - DNA, 20 bp, synthetic construct
  misc_feature 1..20: note = chemically synthesized
  source 1..20: mol_type = other DNA
atggttgcctcttctgttgc

SEQ ID NO: 58718 - DNA, 20 bp, synthetic construct
  misc_feature 1..20: note = chemically synthesized
  source 1..20: mol_type = other DNA
gcttgaatgtcattttgtgg

SEQ ID NO: 58719 - DNA, 20 bp, synthetic construct
  misc_feature 1..20: note = chemically synthesized
  source 1..20: mol_type = other DNA
tccttctcccccaaacccca

SEQ ID NO: 58720 - DNA, 20 bp, synthetic construct
  misc_feature 1..20: note = chemically synthesized
  source 1..20: mol_type = other DNA
agtcaagaatgagcaacttg

SEQ ID NO: 58721 - DNA, 20 bp, synthetic construct
  misc_feature 1..20: note = chemically synthesized
  source 1..20: mol_type = other DNA
aaattaacgcaccaaattga

SEQ ID NO: 58722 - DNA, 20 bp, synthetic construct
  misc_feature 1..20: note = chemically synthesized
  source 1..20: mol_type = other DNA
attgaattagcttgaaatct

SEQ ID NO: 58723 - DNA, 20 bp, synthetic construct
  misc_feature 1..20: note = chemically synthesized
  source 1..20: mol_type = other DNA
gttgatctcttttataggtt

SEQ ID NO: 58724 - DNA, 20 bp, synthetic construct
  misc_feature 1..20: note = chemically synthesized
  source 1..20: mol_type = other DNA
ttataggttcagagttttga

SEQ ID NO: 58725 - DNA, 20 bp, synthetic construct
  misc_feature 1..20: note = chemically synthesized
  source 1..20: mol_type = other DNA
agagttttgaatatgttttt

SEQ ID NO: 58726 - DNA, 20 bp, synthetic construct
  misc_feature 1..20: note = chemically synthesized
  source 1..20: mol_type = other DNA
ttttgtatttttagcagaga

SEQ ID NO: 58727 - DNA, 20 bp, synthetic construct
  misc_feature 1..20: note = chemically synthesized
  source 1..20: mol_type = other DNA
cgcctcggcctcccaaagcg

SEQ ID NO: 58728 - DNA, 20 bp, synthetic construct
  misc_feature 1..20: note = chemically synthesized
  source 1..20: mol_type = other DNA
ccaccgcaccctgcctgaat

SEQ ID NO: 58729 - DNA, 20 bp, synthetic construct
  misc_feature 1..20: note = chemically synthesized
  source 1..20: mol_type = other DNA
atccaattaacaagggtaag

SEQ ID NO: 58730 - DNA, 20 bp, synthetic construct
  misc_feature 1..20: note = chemically synthesized
  source 1..20: mol_type = other DNA
aagatttaagttaagcataa

SEQ ID NO: 58731 - DNA, 20 bp, synthetic construct
  misc_feature 1..20: note = chemically synthesized
  source 1..20: mol_type = other DNA
aaactgtggaatttctcccc

SEQ ID NO: 58732 - DNA, 20 bp, synthetic construct
  misc_feature 1..20: note = chemically synthesized
  source 1..20: mol_type = other DNA
atgttgagaacaagggagat

SEQ ID NO: 58733 - DNA, 20 bp, synthetic construct
  misc_feature 1..20: note = chemically synthesized
  source 1..20: mol_type = other DNA
acagcatttagtactgggtt

SEQ ID NO: 58734 - DNA, 20 bp, synthetic construct
  misc_feature 1..20: note = chemically synthesized
  source 1..20: mol_type = other DNA
atatcacatgaaaaacctgg

SEQ ID NO: 58735 - DNA, 20 bp, synthetic construct
  misc_feature 1..20: note = chemically synthesized
  source 1..20: mol_type = other DNA
ttcaaatgtgtgacagaggg

SEQ ID NO: 58736 - DNA, 20 bp, synthetic construct
  misc_feature 1..20: note = chemically synthesized
  source 1..20: mol_type = other DNA
atagacagtattagaggggg

SEQ ID NO: 58737 - DNA, 20 bp, synthetic construct
  misc_feature 1..20: note = chemically synthesized
  source 1..20: mol_type = other DNA
gtaggaaatttgcatacggt

SEQ ID NO: 58738 - DNA, 20 bp, synthetic construct
  misc_feature 1..20: note = chemically synthesized
  source 1..20: mol_type = other DNA
gcgaccctcccatctgccat

SEQ ID NO: 58739 - DNA, 20 bp, synthetic construct
  misc_feature 1..20: note = chemically synthesized
  source 1..20: mol_type = other DNA
atccttcctatctctcacag

SEQ ID NO: 58740 - DNA, 20 bp, synthetic construct
  misc_feature 1..20: note = chemically synthesized
  source 1..20: mol_type = other DNA
ttctcattaccttcttcctg

SEQ ID NO: 58741 - DNA, 20 bp, synthetic construct
  misc_feature 1..20: note = chemically synthesized
  source 1..20: mol_type = other DNA
tcttcctgttcagcttcgcc

SEQ ID NO: 58742 - DNA, 20 bp, synthetic construct
  misc_feature 1..20: note = chemically synthesized
  source 1..20: mol_type = other DNA
tgtaagagatgtggagtctt

SEQ ID NO: 58743 - DNA, 20 bp, synthetic construct
  misc_feature 1..20: note = chemically synthesized
  source 1..20: mol_type = other DNA
tttaaagtcaacaaccatgc

SEQ ID NO: 58744 - DNA, 20 bp, synthetic construct
  misc_feature 1..20: note = chemically synthesized
  source 1..20: mol_type = other DNA
cgtggaattaaatcacggat

SEQ ID NO: 58745 - DNA, 20 bp, synthetic construct
  misc_feature 1..20: note = chemically synthesized
  source 1..20: mol_type = other DNA
gatggcagattggagggtcg

SEQ ID NO: 58746 - DNA, 20 bp, synthetic construct
  misc_feature 1..20: note = chemically synthesized
  source 1..20: mol_type = other DNA
ccatatcacgtacaccatat

SEQ ID NO: 58747 - DNA, 20 bp, synthetic construct
  misc_feature 1..20: note = chemically synthesized
  source 1..20: mol_type = other DNA
acaatcctaatcatattggg

SEQ ID NO: 58748 - DNA, 20 bp, synthetic construct
  misc_feature 1..20: note = chemically synthesized
  source 1..20: mol_type = other DNA
gttgctagaagttgggttgt

SEQ ID NO: 58749 - DNA, 20 bp, synthetic construct
  misc_feature 1..20: note = chemically synthesized
  source 1..20: mol_type = other DNA
gaaaagaaggctgcctaagg

SEQ ID NO: 58750 - DNA, 20 bp, synthetic construct
  misc_feature 1..20: note = chemically synthesized
  source 1..20: mol_type = other DNA
gctatgccaagccatgtcta

SEQ ID NO: 58751 - DNA, 20 bp, synthetic construct
  misc_feature 1..20: note = chemically synthesized
  source 1..20: mol_type = other DNA
tgcactctcagtaatggggg

SEQ ID NO: 58752 - DNA, 20 bp, synthetic construct
  misc_feature 1..20: note = chemically synthesized
  source 1..20: mol_type = other DNA
atagatggttagtggggtaa

SEQ ID NO: 58753 - DNA, 20 bp, synthetic construct
  misc_feature 1..20: note = chemically synthesized
  source 1..20: mol_type = other DNA
atacatgttcatcgtatttc

SEQ ID NO: 58754 - DNA, 20 bp, synthetic construct
  misc_feature 1..20: note = chemically synthesized
  source 1..20: mol_type = other DNA
catcctccttataagcccag

SEQ ID NO: 58755 - DNA, 20 bp, synthetic construct
  misc_feature 1..20: note = chemically synthesized
  source 1..20: mol_type = other DNA
ataagcccagctctgctttt

SEQ ID NO: 58756 - DNA, 20 bp, synthetic construct
  misc_feature 1..20: note = chemically synthesized
  source 1..20: mol_type = other DNA
aggctagagggcgactctgg

SEQ ID NO: 58757 - DNA, 20 bp, synthetic construct
  misc_feature 1..20: note = chemically synthesized
  source 1..20: mol_type = other DNA
gcgactctggtggtgctttt

SEQ ID NO: 58758 - DNA, 20 bp, synthetic construct
  misc_feature 1..20: note = chemically synthesized
  source 1..20: mol_type = other DNA
gcaaaatgacaaggggaggg

SEQ ID NO: 58759 - DNA, 20 bp, synthetic construct
  misc_feature 1..20: note = chemically synthesized
  source 1..20: mol_type = other DNA
cagctagccaactcctcctt

SEQ ID NO: 58760 - DNA, 20 bp, synthetic construct
  misc_feature 1..20: note = chemically synthesized
  source 1..20: mol_type = other DNA
caacctcttcctcctggttc

SEQ ID NO: 58761 - DNA, 20 bp, synthetic construct
  misc_feature 1..20: note = chemically synthesized
  source 1..20: mol_type = other DNA
tttttagaattttagaagag

SEQ ID NO: 58762 - DNA, 20 bp, synthetic construct
  misc_feature 1..20: note = chemically synthesized
  source 1..20: mol_type = other DNA
tgccttggcctcccaaggtg

SEQ ID NO: 58763 - DNA, 20 bp, synthetic construct
  misc_feature 1..20: note = chemically synthesized
  source 1..20: mol_type = other DNA
caccgcaccgggccctcctt

SEQ ID NO: 58764 - DNA, 20 bp, synthetic construct
  misc_feature 1..20: note = chemically synthesized
  source 1..20: mol_type = other DNA
aagcctatttatttgaaagt

SEQ ID NO: 58765 - DNA, 20 bp, synthetic construct
  misc_feature 1..20: note = chemically synthesized
  source 1..20: mol_type = other DNA
attttagatgcaatgtgatc

SEQ ID NO: 58766 - DNA, 20 bp, synthetic construct
  misc_feature 1..20: note = chemically synthesized
  source 1..20: mol_type = other DNA
tggcccaactaaatttctag

SEQ ID NO: 58767 - DNA, 20 bp, synthetic construct
  misc_feature 1..20: note = chemically synthesized
  source 1..20: mol_type = other DNA
ctgtttccctaaacaaataa

SEQ ID NO: 58768 - DNA, 20 bp, synthetic construct
  misc_feature 1..20: note = chemically synthesized
  source 1..20: mol_type = other DNA
ccaaaatcagcatagaacca

SEQ ID NO: 58769 - DNA, 20 bp, synthetic construct
  misc_feature 1..20: note = chemically synthesized
  source 1..20: mol_type = other DNA
atccagtaactcagtgtcag

SEQ ID NO: 58770 - DNA, 20 bp, synthetic construct
  misc_feature 1..20: note = chemically synthesized
  source 1..20: mol_type = other DNA
gaatgctcaagggagctatt

SEQ ID NO: 58771 - DNA, 20 bp, synthetic construct
  misc_feature 1..20: note = chemically synthesized
  source 1..20: mol_type = other DNA
ctattgcaggtttctctgct

SEQ ID NO: 58772 - DNA, 20 bp, synthetic construct
  misc_feature 1..20: note = chemically synthesized
  source 1..20: mol_type = other DNA
cctcaaatcatcaccgtatc

SEQ ID NO: 58773 - DNA, 20 bp, synthetic construct
  misc_feature 1..20: note = chemically synthesized
  source 1..20: mol_type = other DNA
tccggagtctgtatattcag

SEQ ID NO: 58774 - DNA, 20 bp, synthetic construct
  misc_feature 1..20: note = chemically synthesized
  source 1..20: mol_type = other DNA
agggaagattgcattctcct

SEQ ID NO: 58775 - DNA, 20 bp, synthetic construct
  misc_feature 1..20: note = chemically synthesized
  source 1..20: mol_type = other DNA
tgcctcagcctcccaaagtg

SEQ ID NO: 58776 - DNA, 20 bp, synthetic construct
  misc_feature 1..20: note = chemically synthesized
  source 1..20: mol_type = other DNA
tgggattacagtgtgagcca

SEQ ID NO: 58777 - DNA, 20 bp, synthetic construct
  misc_feature 1..20: note = chemically synthesized
  source 1..20: mol_type = other DNA
agccactgcgcttggccaga

SEQ ID NO: 58778 - DNA, 20 bp, synthetic construct
  misc_feature 1..20: note = chemically synthesized
  source 1..20: mol_type = other DNA
gatctgtctgaactgaaccc

SEQ ID NO: 58779 - DNA, 20 bp, synthetic construct
  misc_feature 1..20: note = chemically synthesized
  source 1..20: mol_type = other DNA
taaatactgcccccactccc

SEQ ID NO: 58780 - DNA, 20 bp, synthetic construct
  misc_feature 1..20: note = chemically synthesized
  source 1..20: mol_type = other DNA
tgataagaaaacataacaga

SEQ ID NO: 58781 - DNA, 20 bp, synthetic construct
  misc_feature 1..20: note = chemically synthesized
  source 1..20: mol_type = other DNA
ttattgagtgctaactttat

SEQ ID NO: 58782 - DNA, 20 bp, synthetic construct
  misc_feature 1..20: note = chemically synthesized
  source 1..20: mol_type = other DNA
gtactttatttatacaatta

SEQ ID NO: 58783 - DNA, 20 bp, synthetic construct
  misc_feature 1..20: note = chemically synthesized
  source 1..20: mol_type = other DNA
gcactttgggaggctgaggt

SEQ ID NO: 58784 - DNA, 20 bp, synthetic construct
  misc_feature 1..20: note = chemically synthesized
  source 1..20: mol_type = other DNA
agctcagaggttgcagtgag

SEQ ID NO: 58785 - DNA, 20 bp, synthetic construct
  misc_feature 1..20: note = chemically synthesized
  source 1..20: mol_type = other DNA
aataatcattttgtaatata

SEQ ID NO: 58786 - DNA, 20 bp, synthetic construct
  misc_feature 1..20: note = chemically synthesized
  source 1..20: mol_type = other DNA
cactcatctgttccctaagt

SEQ ID NO: 58787 - DNA, 20 bp, synthetic construct
  misc_feature 1..20: note = chemically synthesized
  source 1..20: mol_type = other DNA
agatttacgtccactttaga

SEQ ID NO: 58788 - DNA, 20 bp, synthetic construct
  misc_feature 1..20: note = chemically synthesized
  source 1..20: mol_type = other DNA
ctttagaaatggcttgtgag

SEQ ID NO: 58789 - DNA, 20 bp, synthetic construct
  misc_feature 1..20: note = chemically synthesized
  source 1..20: mol_type = other DNA
ggcaagtttaagtgaccgat

SEQ ID NO: 58790 - DNA, 20 bp, synthetic construct
  misc_feature 1..20: note = chemically synthesized
  source 1..20: mol_type = other DNA
gtagaatgttctagtagtgt

SEQ ID NO: 58791 - DNA, 20 bp, synthetic construct
  misc_feature 1..20: note = chemically synthesized
  source 1..20: mol_type = other DNA
agtgtatcagttttcaggtg

SEQ ID NO: 58792 - DNA, 20 bp, synthetic construct
  misc_feature 1..20: note = chemically synthesized
  source 1..20: mol_type = other DNA
tgccacatcacacatagacc

SEQ ID NO: 58793 - DNA, 20 bp, synthetic construct
  misc_feature 1..20: note = chemically synthesized
  source 1..20: mol_type = other DNA
atcacacatagaccaaaggc

SEQ ID NO: 58794 - DNA, 20 bp, synthetic construct
  misc_feature 1..20: note = chemically synthesized
  source 1..20: mol_type = other DNA
agaccaaaggcttaggtttt

SEQ ID NO: 58795 - DNA, 20 bp, synthetic construct
  misc_feature 1..20: note = chemically synthesized
  source 1..20: mol_type = other DNA
gcatgagctgctgcactcag

SEQ ID NO: 58796 - DNA, 20 bp, synthetic construct
  misc_feature 1..20: note = chemically synthesized
  source 1..20: mol_type = other DNA
gctgctgcactcagccatgt

SEQ ID NO: 58797 - DNA, 20 bp, synthetic construct
  misc_feature 1..20: note = chemically synthesized
  source 1..20: mol_type = other DNA
ttgagaggctgagacaggag

SEQ ID NO: 58798 - DNA, 20 bp, synthetic construct
  misc_feature 1..20: note = chemically synthesized
  source 1..20: mol_type = other DNA
aaaaaaaaaaaaagctgtat

SEQ ID NO: 58799 - DNA, 20 bp, synthetic construct
  misc_feature 1..20: note = chemically synthesized
  source 1..20: mol_type = other DNA
tcatttaaagtgtacaattc

SEQ ID NO: 58800 - DNA, 20 bp, synthetic construct
  misc_feature 1..20: note = chemically synthesized
  source 1..20: mol_type = other DNA
cactaatctactttctgtct

SEQ ID NO: 58801 - DNA, 20 bp, synthetic construct
  misc_feature 1..20: note = chemically synthesized
  source 1..20: mol_type = other DNA
ctggcctctttcacttagca

SEQ ID NO: 58802 - DNA, 20 bp, synthetic construct
  misc_feature 1..20: note = chemically synthesized
  source 1..20: mol_type = other DNA
ttcacttagcatgatgtttt

SEQ ID NO: 58803 - DNA, 20 bp, synthetic construct
  misc_feature 1..20: note = chemically synthesized
  source 1..20: mol_type = other DNA
gaatataccacattttattt

SEQ ID NO: 58804 - DNA, 20 bp, synthetic construct
  misc_feature 1..20: note = chemically synthesized
  source 1..20: mol_type = other DNA
cactttgggaggctgaggca

SEQ ID NO: 58805 - DNA, 20 bp, synthetic construct
  misc_feature 1..20: note = chemically synthesized
  source 1..20: mol_type = other DNA
tgcctcagcctcccaaagtg

SEQ ID NO: 58806 - DNA, 20 bp, synthetic construct
  misc_feature 1..20: note = chemically synthesized
  source 1..20: mol_type = other DNA
ggcaaatctatgagacagaa

SEQ ID NO: 58807 - DNA, 20 bp, synthetic construct
  misc_feature 1..20: note = chemically synthesized
  source 1..20: mol_type = other DNA
gaaagtagattagtggttgc

SEQ ID NO: 58808 - DNA, 20 bp, synthetic construct
  misc_feature 1..20: note = chemically synthesized
  source 1..20: mol_type = other DNA
aattatatctcaagctgtta

SEQ ID NO: 58809 - DNA, 20 bp, synthetic construct
  misc_feature 1..20: note = chemically synthesized
  source 1..20: mol_type = other DNA
agctttttttttttttgaga

SEQ ID NO: 58810 - DNA, 20 bp, synthetic construct
  misc_feature 1..20: note = chemically synthesized
  source 1..20: mol_type = other DNA
tgtctcagcctctcaagtag

SEQ ID NO: 58811 - DNA, 20 bp, synthetic construct
  misc_feature 1..20: note = chemically synthesized
  source 1..20: mol_type = other DNA
ttttgtatttttagtagaga

SEQ ID NO: 58812 - DNA, 20 bp, synthetic construct
  misc_feature 1..20: note = chemically synthesized
  source 1..20: mol_type = other DNA
atctcaggtgatctgcctgc

SEQ ID NO: 58813 - DNA, 20 bp, synthetic construct
  misc_feature 1..20: note = chemically synthesized
  source 1..20: mol_type = other DNA
tgccttggcttcccaaagtg

SEQ ID NO: 58814 - DNA, 20 bp, synthetic construct
  misc_feature 1..20: note = chemically synthesized
  source 1..20: mol_type = other DNA
tttgggaggctaaggcggga

SEQ ID NO: 58815 - DNA, 20 bp, synthetic construct
  misc_feature 1..20: note = chemically synthesized
  source 1..20: mol_type = other DNA
gagttggaggttgcagtgag

SEQ ID NO: 58816 - DNA, 20 bp, synthetic construct
  misc_feature 1..20: note = chemically synthesized
  source 1..20: mol_type = other DNA
atgccataacatgacatgga

SEQ ID NO: 58817 - DNA, 20 bp, synthetic construct
  misc_feature 1..20: note = chemically synthesized
  source 1..20: mol_type = other DNA
aataagcaggatatattaca

SEQ ID NO: 58818 - DNA, 20 bp, synthetic construct
  misc_feature 1..20: note = chemically synthesized
  source 1..20: mol_type = other DNA
acaaaatgattattttgtat

SEQ ID NO: 58819 - DNA, 20 bp, synthetic construct
  misc_feature 1..20: note = chemically synthesized
  source 1..20: mol_type = other DNA
gagccacagcacccagccca

SEQ ID NO: 58820 - DNA, 20 bp, synthetic construct
  misc_feature 1..20: note = chemically synthesized
  source 1..20: mol_type = other DNA
cacagcacccagcccagact

SEQ ID NO: 58821 - DNA, 20 bp, synthetic construct
  misc_feature 1..20: note = chemically synthesized
  source 1..20: mol_type = other DNA
tcactgcaacctctgagctc

SEQ ID NO: 58822 - DNA, 20 bp, synthetic construct
  misc_feature 1..20: note = chemically synthesized
  source 1..20: mol_type = other DNA
aggaccacaggcatgcacca

SEQ ID NO: 58823 - DNA, 20 bp, synthetic construct
  misc_feature 1..20: note = chemically synthesized
  source 1..20: mol_type = other DNA
catgcaccaccacgcttggc

SEQ ID NO: 58824 - DNA, 20 bp, synthetic construct
  misc_feature 1..20: note = chemically synthesized
  source 1..20: mol_type = other DNA
cacctcagcctcccaaagtg

SEQ ID NO: 58825 - DNA, 20 bp, synthetic construct
  misc_feature 1..20: note = chemically synthesized
  source 1..20: mol_type = other DNA
cactcaataaactttatctg

SEQ ID NO: 58826 - DNA, 20 bp, synthetic construct
  misc_feature 1..20: note = chemically synthesized
  source 1..20: mol_type = other DNA
ggacttggtccttgggagca

SEQ ID NO: 58827 - DNA, 20 bp, synthetic construct
  misc_feature 1..20: note = chemically synthesized
  source 1..20: mol_type = other DNA
ctttctccctggttgggacc

SEQ ID NO: 58828 - DNA, 20 bp, synthetic construct
  misc_feature 1..20: note = chemically synthesized
  source 1..20: mol_type = other DNA
ggagttcaggtgtgaaatag

SEQ ID NO: 58829 - DNA, 20 bp, synthetic construct
  misc_feature 1..20: note = chemically synthesized
  source 1..20: mol_type = other DNA
caggaaatccattgatacgg

SEQ ID NO: 58830 - DNA, 20 bp, synthetic construct
  misc_feature 1..20: note = chemically synthesized
  source 1..20: mol_type = other DNA
ttccttggtgctgtgactgg

SEQ ID NO: 58831 - DNA, 20 bp, synthetic construct
  misc_feature 1..20: note = chemically synthesized
  source 1..20: mol_type = other DNA
aaccttgctgacactgagtt

SEQ ID NO: 58832 - DNA, 20 bp, synthetic construct
  misc_feature 1..20: note = chemically synthesized
  source 1..20: mol_type = other DNA
gtgttactgcaacttgtgtg

SEQ ID NO: 58833 - DNA, 20 bp, synthetic construct
  misc_feature 1..20: note = chemically synthesized
  source 1..20: mol_type = other DNA
tactgcaacttgtgtgccct

SEQ ID NO: 58834 - DNA, 20 bp, synthetic construct
  misc_feature 1..20: note = chemically synthesized
  source 1..20: mol_type = other DNA
tctgaatctttctggttcta

SEQ ID NO: 58835 - DNA, 20 bp, synthetic construct
  misc_feature 1..20: note = chemically synthesized
  source 1..20: mol_type = other DNA
gttctatgctgattttgggc

SEQ ID NO: 58836 - DNA, 20 bp, synthetic construct
  misc_feature 1..20: note = chemically synthesized
  source 1..20: mol_type = other DNA
aggcacagagaaaccaaatt

SEQ ID NO: 58837 - DNA, 20 bp, synthetic construct
  misc_feature 1..20: note = chemically synthesized
  source 1..20: mol_type = other DNA
gactttattcttaaataaaa

SEQ ID NO: 58838 - DNA, 20 bp, synthetic construct
  misc_feature 1..20: note = chemically synthesized
  source 1..20: mol_type = other DNA
aaagatgttatgagcaggat

SEQ ID NO: 58839 - DNA, 20 bp, synthetic construct
  misc_feature 1..20: note = chemically synthesized
  source 1..20: mol_type = other DNA
aaacaaggactttcaaataa

SEQ ID NO: 58840 - DNA, 20 bp, synthetic construct
  misc_feature 1..20: note = chemically synthesized
  source 1..20: mol_type = other DNA
ggactttcaaataaataggc

SEQ ID NO: 58841 - DNA, 20 bp, synthetic construct
  misc_feature 1..20: note = chemically synthesized
  source 1..20: mol_type = other DNA
agaaatactctgcatatcag

SEQ ID NO: 58842 - DNA, 20 bp, synthetic construct
  misc_feature 1..20: note = chemically synthesized
  source 1..20: mol_type = other DNA
tgaggaggctgagacatgag

SEQ ID NO: 58843 - DNA, 20 bp, synthetic construct
  misc_feature 1..20: note = chemically synthesized
  source 1..20: mol_type = other DNA
ggagttggctagctggacat

SEQ ID NO: 58844 - DNA, 20 bp, synthetic construct
  misc_feature 1..20: note = chemically synthesized
  source 1..20: mol_type = other DNA
acgctgtggtagggtgggag

SEQ ID NO: 58845 - DNA, 20 bp, synthetic construct
  misc_feature 1..20: note = chemically synthesized
  source 1..20: mol_type = other DNA
cctttaagaatgtgctcttg

SEQ ID NO: 58846 - DNA, 20 bp, synthetic construct
  misc_feature 1..20: note = chemically synthesized
  source 1..20: mol_type = other DNA
ccctccccttgtcattttgc

SEQ ID NO: 58847 - DNA, 20 bp, synthetic construct
  misc_feature 1..20: note = chemically synthesized
  source 1..20: mol_type = other DNA
agaatctggaaaaagcagag

SEQ ID NO: 58848 - DNA, 20 bp, synthetic construct
  misc_feature 1..20: note = chemically synthesized
  source 1..20: mol_type = other DNA
aggagatgtcagctatacct

SEQ ID NO: 58849 - DNA, 20 bp, synthetic construct
  misc_feature 1..20: note = chemically synthesized
  source 1..20: mol_type = other DNA
tataattaaagccatttaga

SEQ ID NO: 58850 - DNA, 20 bp, synthetic construct
  misc_feature 1..20: note = chemically synthesized
  source 1..20: mol_type = other DNA
ttaggcagccttcttttcct

SEQ ID NO: 58851 - DNA, 20 bp, synthetic construct
  misc_feature 1..20: note = chemically synthesized
  source 1..20: mol_type = other DNA
tctcagttaggatctccagc

SEQ ID NO: 58852 - DNA, 20 bp, synthetic construct
  misc_feature 1..20: note = chemically synthesized
  source 1..20: mol_type = other DNA
gagctggccctacctggaag

SEQ ID NO: 58853 - DNA, 20 bp, synthetic construct
  misc_feature 1..20: note = chemically synthesized
  source 1..20: mol_type = other DNA
tctagcaacaggtctttctc

SEQ ID NO: 58854 - DNA, 20 bp, synthetic construct
  misc_feature 1..20: note = chemically synthesized
  source 1..20: mol_type = other DNA
aggtctttctcaatagcttc

SEQ ID NO: 58855 - DNA, 20 bp, synthetic construct
  misc_feature 1..20: note = chemically synthesized
  source 1..20: mol_type = other DNA
cttttcaaaaacattaccca

SEQ ID NO: 58856 - DNA, 20 bp, synthetic construct
  misc_feature 1..20: note = chemically synthesized
  source 1..20: mol_type = other DNA
aaaaacattacccaatatga

SEQ ID NO: 58857 - DNA, 20 bp, synthetic construct
  misc_feature 1..20: note = chemically synthesized
  source 1..20: mol_type = other DNA
gcgaccctccaatctgccat

SEQ ID NO: 58858 - DNA, 20 bp, synthetic construct
  misc_feature 1..20: note = chemically synthesized
  source 1..20: mol_type = other DNA
ttgctccaaataccagtgcc

SEQ ID NO: 58859 - DNA, 20 bp, synthetic construct
  misc_feature 1..20: note = chemically synthesized
  source 1..20: mol_type = other DNA
agaccagctcgacttgggat

SEQ ID NO: 58860 - DNA, 20 bp, synthetic construct
  misc_feature 1..20: note = chemically synthesized
  source 1..20: mol_type = other DNA
ggcggaatgggagccacttg

SEQ ID NO: 58861 - DNA, 20 bp, synthetic construct
  misc_feature 1..20: note = chemically synthesized
  source 1..20: mol_type = other DNA
tctggctgctcgcaccacct

SEQ ID NO: 58862 - DNA, 20 bp, synthetic construct
  misc_feature 1..20: note = chemically synthesized
  source 1..20: mol_type = other DNA
tagatgctgtggatgtggct

SEQ ID NO: 58863 - DNA, 20 bp, synthetic construct
  misc_feature 1..20: note = chemically synthesized
  source 1..20: mol_type = other DNA
agcatgactgtgagagatag

SEQ ID NO: 58864 - DNA, 20 bp, synthetic construct
  misc_feature 1..20: note = chemically synthesized
  source 1..20: mol_type = other DNA
atttgggacctttgctagag

SEQ ID NO: 58865 - DNA, 20 bp, synthetic construct
  misc_feature 1..20: note = chemically synthesized
  source 1..20: mol_type = other DNA
gatggcagatgggagggtcg

SEQ ID NO: 58866 - DNA, 20 bp, synthetic construct
  misc_feature 1..20: note = chemically synthesized
  source 1..20: mol_type = other DNA
tccattttatctttgaacgg

SEQ ID NO: 58867 - DNA, 20 bp, synthetic construct
  misc_feature 1..20: note = chemically synthesized
  source 1..20: mol_type = other DNA
tctctctaacctaaacattc

SEQ ID NO: 58868 - DNA, 20 bp, synthetic construct
  misc_feature 1..20: note = chemically synthesized
  source 1..20: mol_type = other DNA
ttcccaggtttttcatgtga

SEQ ID NO: 58869 - DNA, 20 bp, synthetic construct
  misc_feature 1..20: note = chemically synthesized
  source 1..20: mol_type = other DNA
tactaaatgctgtgttactt

SEQ ID NO: 58870 - DNA, 20 bp, synthetic construct
  misc_feature 1..20: note = chemically synthesized
  source 1..20: mol_type = other DNA
aatctccaggggagaaattc

SEQ ID NO: 58871 - DNA, 20 bp, synthetic construct
  misc_feature 1..20: note = chemically synthesized
  source 1..20: mol_type = other DNA
tgcctcccacaaaatctttc

SEQ ID NO: 58872 - DNA, 20 bp, synthetic construct
  misc_feature 1..20: note = chemically synthesized
  source 1..20: mol_type = other DNA
gtggctcacccttgtaatcc

SEQ ID NO: 58873 - DNA, 20 bp, synthetic construct
  misc_feature 1..20: note = chemically synthesized
  source 1..20: mol_type = other DNA
aatggcgtgaacccaggagg

SEQ ID NO: 58874 - DNA, 20 bp, synthetic construct
  misc_feature 1..20: note = chemically synthesized
  source 1..20: mol_type = other DNA
agatcaactgcagttatcta

SEQ ID NO: 58875 - DNA, 20 bp, synthetic construct
  misc_feature 1..20: note = chemically synthesized
  source 1..20: mol_type = other DNA
caaatgaatgtatttaaatg

SEQ ID NO: 58876 - DNA, 20 bp, synthetic construct
  misc_feature 1..20: note = chemically synthesized
  source 1..20: mol_type = other DNA
cgtgttaatttgttaaattt

SEQ ID NO: 58877 - DNA, 20 bp, synthetic construct
  misc_feature 1..20: note = chemically synthesized
  source 1..20: mol_type = other DNA
tgttgaagaccagtaagaaa

SEQ ID NO: 58878 - DNA, 20 bp, synthetic construct
  misc_feature 1..20: note = chemically synthesized
  source 1..20: mol_type = other DNA
aataaagattgtaaaaagct

SEQ ID NO: 58879 - DNA, 20 bp, synthetic construct
  misc_feature 1..20: note = chemically synthesized
  source 1..20: mol_type = other DNA
acccacagaaatgctaacag

SEQ ID NO: 58880 - DNA, 20 bp, synthetic construct
  misc_feature 1..20: note = chemically synthesized
  source 1..20: mol_type = other DNA
cacaggatgtggctggaatg

SEQ ID NO: 58881 - DNA, 20 bp, synthetic construct
  misc_feature 1..20: note = chemically synthesized
  source 1..20: mol_type = other DNA
gctggaatgctgggattttg

SEQ ID NO: 58882 - DNA, 20 bp, synthetic construct
  misc_feature 1..20: note = chemically synthesized
  source 1..20: mol_type = other DNA
gattagggagagaaacggaa

SEQ ID NO: 58883 - DNA, 20 bp, synthetic construct
  misc_feature 1..20: note = chemically synthesized
  source 1..20: mol_type = other DNA
atgaggaaaatgagcagcaa

SEQ ID NO: 58884 - DNA, 20 bp, synthetic construct
  misc_feature 1..20: note = chemically synthesized
  source 1..20: mol_type = other DNA
gatcaaaattgaccaggcac

SEQ ID NO: 58885 - DNA, 20 bp, synthetic construct
  misc_feature 1..20: note = chemically synthesized
  source 1..20: mol_type = other DNA
aattgaccaggcacggtggc

SEQ ID NO: 58886 - DNA, 20 bp, synthetic construct
  misc_feature 1..20: note = chemically synthesized
  source 1..20: mol_type = other DNA
tgggtggatcacttgaggtc

SEQ ID NO: 58887 - DNA, 20 bp, synthetic construct
  misc_feature 1..20: note = chemically synthesized
  source 1..20: mol_type = other DNA
ttgagaggctgaggcaggag

SEQ ID NO: 58888 - DNA, 20 bp, synthetic construct
  misc_feature 1..20: note = chemically synthesized
  source 1..20: mol_type = other DNA
tcggtaggctgaggcagaag

SEQ ID NO: 58889 - DNA, 20 bp, synthetic construct
  misc_feature 1..20: note = chemically synthesized
  source 1..20: mol_type = other DNA
actccagcctgggcaacaga

SEQ ID NO: 58890 - DNA, 20 bp, synthetic construct
  misc_feature 1..20: note = chemically synthesized
  source 1..20: mol_type = other DNA
aattttaacttccctatttt

SEQ ID NO: 58891 - DNA, 20 bp, synthetic construct
  misc_feature 1..20: note = chemically synthesized
  source 1..20: mol_type = other DNA
tattttatctgtttgataat

SEQ ID NO: 58892 - DNA, 20 bp, synthetic construct
  misc_feature 1..20: note = chemically synthesized
  source 1..20: mol_type = other DNA
ttaggaggctgaggcaagcc

SEQ ID NO: 58893 - DNA, 20 bp, synthetic construct
  misc_feature 1..20: note = chemically synthesized
  source 1..20: mol_type = other DNA
tcagatggctgaggtgggag

SEQ ID NO: 58894 - DNA, 20 bp, synthetic construct
  misc_feature 1..20: note = chemically synthesized
  source 1..20: mol_type = other DNA
catctcaaaaataaaaataa

SEQ ID NO: 58895 - DNA, 20 bp, synthetic construct
  misc_feature 1..20: note = chemically synthesized
  source 1..20: mol_type = other DNA
ttctctgtagtaggaatatc

SEQ ID NO: 58896 - DNA, 20 bp, synthetic construct
  misc_feature 1..20: note = chemically synthesized
  source 1..20: mol_type = other DNA
actctgtggttggtacagac

SEQ ID NO: 58897 - DNA, 20 bp, synthetic construct
  misc_feature 1..20: note = chemically synthesized
  source 1..20: mol_type = other DNA
ttataagtcccttcatggtg

SEQ ID NO: 58898 - DNA, 20 bp, synthetic construct
  misc_feature 1..20: note = chemically synthesized
  source 1..20: mol_type = other DNA
agtcccttcatggtgttggg

SEQ ID NO: 58899 - DNA, 20 bp, synthetic construct
  misc_feature 1..20: note = chemically synthesized
  source 1..20: mol_type = other DNA
tgtttccttatctgtaaaac

SEQ ID NO: 58900 - DNA, 20 bp, synthetic construct
  misc_feature 1..20: note = chemically synthesized
  source 1..20: mol_type = other DNA
gcccaaacattccctgactc

SEQ ID NO: 58901 - DNA, 20 bp, synthetic construct
  misc_feature 1..20: note = chemically synthesized
  source 1..20: mol_type = other DNA
gttcttaccgaaatctgtag

SEQ ID NO: 58902 - DNA, 20 bp, synthetic construct
  misc_feature 1..20: note = chemically synthesized
  source 1..20: mol_type = other DNA
ccagagaggggccctgctct

SEQ ID NO: 58903 - DNA, 20 bp, synthetic construct
  misc_feature 1..20: note = chemically synthesized
  source 1..20: mol_type = other DNA
tcttgcagtttaatacagtc

SEQ ID NO: 58904 - DNA, 20 bp, synthetic construct
  misc_feature 1..20: note = chemically synthesized
  source 1..20: mol_type = other DNA
tgttctggctacactggcct

SEQ ID NO: 58905 - DNA, 20 bp, synthetic construct
  misc_feature 1..20: note = chemically synthesized
  source 1..20: mol_type = other DNA
caccaaacacgttcccacct

SEQ ID NO: 58906 - DNA, 20 bp, synthetic construct
  misc_feature 1..20: note = chemically synthesized
  source 1..20: mol_type = other DNA
actctgaccacgctatttaa

SEQ ID NO: 58907 - DNA, 20 bp, synthetic construct
  misc_feature 1..20: note = chemically synthesized
  source 1..20: mol_type = other DNA
ttaaccctgcttgcaaccgg

SEQ ID NO: 58908 - DNA, 20 bp, synthetic construct
  misc_feature 1..20: note = chemically synthesized
  source 1..20: mol_type = other DNA
gcaaccggttccgttttttt

SEQ ID NO: 58909 - DNA, 20 bp, synthetic construct
  misc_feature 1..20: note = chemically synthesized
  source 1..20: mol_type = other DNA
ccggttccgtttttttattt

SEQ ID NO: 58910 - DNA, 20 bp, synthetic construct
  misc_feature 1..20: note = chemically synthesized
  source 1..20: mol_type = other DNA
cgtttttttatttgtttgtt

SEQ ID NO: 58911 - DNA, 20 bp, synthetic construct
  misc_feature 1..20: note = chemically synthesized
  source 1..20: mol_type = other DNA
ttgtttttttagagacagtg

SEQ ID NO: 58912 - DNA, 20 bp, synthetic construct
  misc_feature 1..20: note = chemically synthesized
  source 1..20: mol_type = other DNA
acacacagcaaattttttaa

SEQ ID NO: 58913 - DNA, 20 bp, synthetic construct
  misc_feature 1..20: note = chemically synthesized
  source 1..20: mol_type = other DNA
cagcaaattttttaaatgtg

SEQ ID NO: 58914 - DNA, 20 bp, synthetic construct
  misc_feature 1..20: note = chemically synthesized
  source 1..20: mol_type = other DNA
aaattttttaaatgtgtttt

SEQ ID NO: 58915 - DNA, 20 bp, synthetic construct
  misc_feature 1..20: note = chemically synthesized
  source 1..20: mol_type = other DNA
tttttaaatgtgttttgttt

SEQ ID NO: 58916 - DNA, 20 bp, synthetic construct
  misc_feature 1..20: note = chemically synthesized
  source 1..20: mol_type = other DNA
taaatgtgttttgtttgttt

SEQ ID NO: 58917 - DNA, 20 bp, synthetic construct
  misc_feature 1..20: note = chemically synthesized
  source 1..20: mol_type = other DNA
tgtgttttgtttgtttgttt

SEQ ID NO: 58918 - DNA, 20 bp, synthetic construct
  misc_feature 1..20: note = chemically synthesized
  source 1..20: mol_type = other DNA
gtttgattgtttttgcccag

SEQ ID NO: 58919 - DNA, 20 bp, synthetic construct
  misc_feature 1..20: note = chemically synthesized
  source 1..20: mol_type = other DNA
acccttggcctcccaaagtg

SEQ ID NO: 58920 - DNA, 20 bp, synthetic construct
  misc_feature 1..20: note = chemically synthesized
  source 1..20: mol_type = other DNA
ctgttgagagtgtgatggta

SEQ ID NO: 58921 - DNA, 20 bp, synthetic construct
  misc_feature 1..20: note = chemically synthesized
  source 1..20: mol_type = other DNA
aaggttacgctctccccagg

SEQ ID NO: 58922 - DNA, 20 bp, synthetic construct
  misc_feature 1..20: note = chemically synthesized
  source 1..20: mol_type = other DNA
accaactctgaggagccatc

SEQ ID NO: 58923 - DNA, 20 bp, synthetic construct
  misc_feature 1..20: note = chemically synthesized
  source 1..20: mol_type = other DNA
gcacgtgaatctccatttca

SEQ ID NO: 58924 - DNA, 20 bp, synthetic construct
  misc_feature 1..20: note = chemically synthesized
  source 1..20: mol_type = other DNA
agggaaccccatagataaat

SEQ ID NO: 58925 - DNA, 20 bp, synthetic construct
  misc_feature 1..20: note = chemically synthesized
  source 1..20: mol_type = other DNA
accaaggctggagtgcagtg

SEQ ID NO: 58926 - DNA, 20 bp, synthetic construct
  misc_feature 1..20: note = chemically synthesized
  source 1..20: mol_type = other DNA
aacctctgcctcccgggttg

SEQ ID NO: 58927 - DNA, 20 bp, synthetic construct
  misc_feature 1..20: note = chemically synthesized
  source 1..20: mol_type = other DNA
tgccgcagcctcctgggtag

SEQ ID NO: 58928 - DNA, 20 bp, synthetic construct
  misc_feature 1..20: note = chemically synthesized
  source 1..20: mol_type = other DNA
gcgcccgccaccatgcctgg

SEQ ID NO: 58929 - DNA, 20 bp, synthetic construct
  misc_feature 1..20: note = chemically synthesized
  source 1..20: mol_type = other DNA
ttgtatttttttattagtga

SEQ ID NO: 58930 - DNA, 20 bp, synthetic construct
  misc_feature 1..20: note = chemically synthesized
  source 1..20: mol_type = other DNA
tgcgttggcctcccaaagtg

SEQ ID NO: 58931 - DNA, 20 bp, synthetic construct
  misc_feature 1..20: note = chemically synthesized
  source 1..20: mol_type = other DNA
cctaaggagcagagataata

SEQ ID NO: 58932 - DNA, 20 bp, synthetic construct
  misc_feature 1..20: note = chemically synthesized
  source 1..20: mol_type = other DNA
agcaaacatatttctacaaa

SEQ ID NO: 58933 - DNA, 20 bp, synthetic construct
  misc_feature 1..20: note = chemically synthesized
  source 1..20: mol_type = other DNA
gctcaccacctcccaggttc

SEQ ID NO: 58934 - DNA, 20 bp, synthetic construct
  misc_feature 1..20: note = chemically synthesized
  source 1..20: mol_type = other DNA
tgccttagcctcctgagtag

SEQ ID NO: 58935 - DNA, 20 bp, synthetic construct
  misc_feature 1..20: note = chemically synthesized
  source 1..20: mol_type = other DNA
ttttgtatttttagtagaga

SEQ ID NO: 58936 - DNA, 20 bp, synthetic construct
  misc_feature 1..20: note = chemically synthesized
  source 1..20: mol_type = other DNA
cgcctcagcctcccaaagtg

SEQ ID NO: 58937 - DNA, 20 bp, synthetic construct
  misc_feature 1..20: note = chemically synthesized
  source 1..20: mol_type = other DNA
cctggcctatcctacatatt

SEQ ID NO: 58938 - DNA, 20 bp, synthetic construct
  misc_feature 1..20: note = chemically synthesized
  source 1..20: mol_type = other DNA
aacctctgcctcccaggttc

SEQ ID NO: 58939 - DNA, 20 bp, synthetic construct
  misc_feature 1..20: note = chemically synthesized
  source 1..20: mol_type = other DNA
tttttccatttttagtaaag

SEQ ID NO: 58940 - DNA, 20 bp, synthetic construct
  misc_feature 1..20: note = chemically synthesized
  source 1..20: mol_type = other DNA
gattttgcaatgttggccag

SEQ ID NO: 58941 - DNA, 20 bp, synthetic construct
  misc_feature 1..20: note = chemically synthesized
  source 1..20: mol_type = other DNA
acctcaggtgatctacctac

SEQ ID NO: 58942 - DNA, 20 bp, synthetic construct
  misc_feature 1..20: note = chemically synthesized
  source 1..20: mol_type = other DNA
taccttggcttcccaaagtg

SEQ ID NO: 58943 - DNA, 20 bp, synthetic construct
  misc_feature 1..20: note = chemically synthesized
  source 1..20: mol_type = other DNA
gcatgagcaaccacaactgg

SEQ ID NO: 58944 - DNA, 20 bp, synthetic construct
  misc_feature 1..20: note = chemically synthesized
  source 1..20: mol_type = other DNA
tgtatatttcacctcctcta

SEQ ID NO: 58945 - DNA, 20 bp, synthetic construct
  misc_feature 1..20: note = chemically synthesized
  source 1..20: mol_type = other DNA
aacagtgtatagctcccagt

SEQ ID NO: 58946 - DNA, 20 bp, synthetic construct
  misc_feature 1..20: note = chemically synthesized
  source 1..20: mol_type = other DNA
caaataactaagggaccttc

SEQ ID NO: 58947 - DNA, 20 bp, synthetic construct
  misc_feature 1..20: note = chemically synthesized
  source 1..20: mol_type = other DNA
ctgagactttagggtgaggg

SEQ ID NO: 58948 - DNA, 20 bp, synthetic construct
  misc_feature 1..20: note = chemically synthesized
  source 1..20: mol_type = other DNA
tactgaaaatgaaatctatc

SEQ ID NO: 58949 - DNA, 20 bp, synthetic construct
  misc_feature 1..20: note = chemically synthesized
  source 1..20: mol_type = other DNA
aacgtaggcacagagagggc

SEQ ID NO: 58950 - DNA, 20 bp, synthetic construct
  misc_feature 1..20: note = chemically synthesized
  source 1..20: mol_type = other DNA
tgggaaggacccccagaagc

SEQ ID NO: 58951 - DNA, 20 bp, synthetic construct
  misc_feature 1..20: note = chemically synthesized
  source 1..20: mol_type = other DNA
tccatccaggttctgtaata

SEQ ID NO: 58952 - DNA, 20 bp, synthetic construct
  misc_feature 1..20: note = chemically synthesized
  source 1..20: mol_type = other DNA
tctcctcatgtcccctcaag

SEQ ID NO: 58953 - DNA, 20 bp, synthetic construct
  misc_feature 1..20: note = chemically synthesized
  source 1..20: mol_type = other DNA
taacaggtaaacgaggtcca

SEQ ID NO: 58954 - DNA, 20 bp, synthetic construct
  misc_feature 1..20: note = chemically synthesized
  source 1..20: mol_type = other DNA
gcttctgtctgcaggggctg

SEQ ID NO: 58955 - DNA, 20 bp, synthetic construct
  misc_feature 1..20: note = chemically synthesized
  source 1..20: mol_type = other DNA
cagtctcacaggttacaggg

SEQ ID NO: 58956 - DNA, 20 bp, synthetic construct
  misc_feature 1..20: note = chemically synthesized
  source 1..20: mol_type = other DNA
gaatcctatggaaaaacaga

SEQ ID NO: 58957 - DNA, 20 bp, synthetic construct
  misc_feature 1..20: note = chemically synthesized
  source 1..20: mol_type = other DNA
agtttctggggttactgaat

SEQ ID NO: 58958 - DNA, 20 bp, synthetic construct
  misc_feature 1..20: note = chemically synthesized
  source 1..20: mol_type = other DNA
tcaagaagagtgtagcctga

SEQ ID NO: 58959 - DNA, 20 bp, synthetic construct
  misc_feature 1..20: note = chemically synthesized
  source 1..20: mol_type = other DNA
tatgtaacttttgcattttg

SEQ ID NO: 58960 - DNA, 20 bp, synthetic construct
  misc_feature 1..20: note = chemically synthesized
  source 1..20: mol_type = other DNA
ggtgtgtgccaccacatcca

SEQ ID NO: 58961 - DNA, 20 bp, synthetic construct
  misc_feature 1..20: note = chemically synthesized
  source 1..20: mol_type = other DNA
ttttgtatttttagtagaga

SEQ ID NO: 58962 - DNA, 20 bp, synthetic construct
  misc_feature 1..20: note = chemically synthesized
  source 1..20: mol_type = other DNA
cacctcagcctcccaaagtg

SEQ ID NO: 58963 - DNA, 20 bp, synthetic construct
  misc_feature 1..20: note = chemically synthesized
  source 1..20: mol_type = other DNA
ttaaacacaaataatgaagc

SEQ ID NO: 58964 - DNA, 20 bp, synthetic construct
  misc_feature 1..20: note = chemically synthesized
  source 1..20: mol_type = other DNA
caggcagatcacatgaggtc

SEQ ID NO: 58965 - DNA, 20 bp, synthetic construct
  misc_feature 1..20: note = chemically synthesized
  source 1..20: mol_type = other DNA
gcctggccaacatggtgaaa

SEQ ID NO: 58966 - DNA, 20 bp, synthetic construct
  misc_feature 1..20: note = chemically synthesized
  source 1..20: mol_type = other DNA
tcgggaggctaaggcaagag

SEQ ID NO: 58967 - DNA, 20 bp, synthetic construct
  misc_feature 1..20: note = chemically synthesized
  source 1..20: mol_type = other DNA
gaggcggaggttgccgtgag

SEQ ID NO: 58968 - DNA, 20 bp, synthetic construct
  misc_feature 1..20: note = chemically synthesized
  source 1..20: mol_type = other DNA
tggaagaatgcatatggaac

SEQ ID NO: 58969 - DNA, 20 bp, synthetic construct
  misc_feature 1..20: note = chemically synthesized
  source 1..20: mol_type = other DNA
ttgctctctgtaaggatgta

SEQ ID NO: 58970 - DNA, 20 bp, synthetic construct
  misc_feature 1..20: note = chemically synthesized
  source 1..20: mol_type = other DNA
gtaaggatgtatatagcttc

SEQ ID NO: 58971 - DNA, 20 bp, synthetic construct
  misc_feature 1..20: note = chemically synthesized
  source 1..20: mol_type = other DNA
tttatcccgtgatggtggaa

SEQ ID NO: 58972 - DNA, 20 bp, synthetic construct
  misc_feature 1..20: note = chemically synthesized
  source 1..20: mol_type = other DNA
ctctggcctctatcaaccca

SEQ ID NO: 58973 - DNA, 20 bp, synthetic construct
  misc_feature 1..20: note = chemically synthesized
  source 1..20: mol_type = other DNA
atggttcttcaatggagatc

SEQ ID NO: 58974 - DNA, 20 bp, synthetic construct
  misc_feature 1..20: note = chemically synthesized
  source 1..20: mol_type = other DNA
gaggcagaggttgcagtgag

SEQ ID NO: 58975 - DNA, 20 bp, synthetic construct
  misc_feature 1..20: note = chemically synthesized
  source 1..20: mol_type = other DNA
aaagaaagtggccagaatgg

SEQ ID NO: 58976 - DNA, 20 bp, synthetic construct
  misc_feature 1..20: note = chemically synthesized
  source 1..20: mol_type = other DNA
aaattggcaaatgctaaact

SEQ ID NO: 58977 - DNA, 20 bp, synthetic construct
  misc_feature 1..20: note = chemically synthesized
  source 1..20: mol_type = other DNA
tttcccctgctccccagaga

SEQ ID NO: 58978 - DNA, 20 bp, synthetic construct
  misc_feature 1..20: note = chemically synthesized
  source 1..20: mol_type = other DNA
gcggaagccagcctgcctac

SEQ ID NO: 58979 - DNA, 20 bp, synthetic construct
  misc_feature 1..20: note = chemically synthesized
  source 1..20: mol_type = other DNA
agcaccttggtctctgcatc

SEQ ID NO: 58980 - DNA, 20 bp, synthetic construct
  misc_feature 1..20: note = chemically synthesized
  source 1..20: mol_type = other DNA
atagcacatggactggcaca

SEQ ID NO: 58981 - DNA, 20 bp, synthetic construct
  misc_feature 1..20: note = chemically synthesized
  source 1..20: mol_type = other DNA
cactgtttaataaatgttaa

SEQ ID NO: 58982 - DNA, 20 bp, synthetic construct
  misc_feature 1..20: note = chemically synthesized
  source 1..20: mol_type = other DNA
gctgccagagataacctatt

SEQ ID NO: 58983 - DNA, 20 bp, synthetic construct
  misc_feature 1..20: note = chemically synthesized
  source 1..20: mol_type = other DNA
aacaggctgttgaatcatct

SEQ ID NO: 58984 - DNA, 20 bp, synthetic construct
  misc_feature 1..20: note = chemically synthesized
  source 1..20: mol_type = other DNA
acacgcccagctaattttcg

SEQ ID NO: 58985 - DNA, 20 bp, synthetic construct
  misc_feature 1..20: note = chemically synthesized
  source 1..20: mol_type = other DNA
tcgtaatgtttttgtagaga

SEQ ID NO: 58986 - DNA, 20 bp, synthetic construct
  misc_feature 1..20: note = chemically synthesized
  source 1..20: mol_type = other DNA
gaactcctgagttcacccag

SEQ ID NO: 58987 - DNA, 20 bp, synthetic construct
  misc_feature 1..20: note = chemically synthesized
  source 1..20: mol_type = other DNA
cacctcggcctcccaaagtg

SEQ ID NO: 58988 - DNA, 20 bp, synthetic construct
  misc_feature 1..20: note = chemically synthesized
  source 1..20: mol_type = other DNA
atctttctttatgttacctc

SEQ ID NO: 58989 - DNA, 20 bp, synthetic construct
  misc_feature 1..20: note = chemically synthesized
  source 1..20: mol_type = other DNA
taccctttaacccatatgaa

SEQ ID NO: 58990 - DNA, 20 bp, synthetic construct
  misc_feature 1..20: note = chemically synthesized
  source 1..20: mol_type = other DNA
cctgtattttcaactcactg

SEQ ID NO: 58991 - DNA, 20 bp, synthetic construct
  misc_feature 1..20: note = chemically synthesized
  source 1..20: mol_type = other DNA
ggttggaagcatgagtagcc

SEQ ID NO: 58992 - DNA, 20 bp, synthetic construct
  misc_feature 1..20: note = chemically synthesized
  source 1..20: mol_type = other DNA
ctccaatcacagctacccaa

SEQ ID NO: 58993 - DNA, 20 bp, synthetic construct
  misc_feature 1..20: note = chemically synthesized
  source 1..20: mol_type = other DNA
acccaaaggagtttaatgcc

SEQ ID NO: 58994 - DNA, 20 bp, synthetic construct
  misc_feature 1..20: note = chemically synthesized
  source 1..20: mol_type = other DNA
gcagagcccttgcagttatt

SEQ ID NO: 58995 - DNA, 20 bp, synthetic construct
  misc_feature 1..20: note = chemically synthesized
  source 1..20: mol_type = other DNA
tgcagttattccaggcttgg

SEQ ID NO: 58996 - DNA, 20 bp, synthetic construct
  misc_feature 1..20: note = chemically synthesized
  source 1..20: mol_type = other DNA
gctatgagtctgtgccttgc

SEQ ID NO: 58997 - DNA, 20 bp, synthetic construct
  misc_feature 1..20: note = chemically synthesized
  source 1..20: mol_type = other DNA
ctgatctttggactcaaaaa

SEQ ID NO: 58998 - DNA, 20 bp, synthetic construct
  misc_feature 1..20: note = chemically synthesized
  source 1..20: mol_type = other DNA
ggttgatgcaaacatgttca

SEQ ID NO: 58999 - DNA, 20 bp, synthetic construct
  misc_feature 1..20: note = chemically synthesized
  source 1..20: mol_type = other DNA
ggccatgtactcagcagggc

SEQ ID NO: 59000 - DNA, 20 bp, synthetic construct
  misc_feature 1..20: note = chemically synthesized
  source 1..20: mol_type = other DNA
agggccaatgattaactttg

SEQ ID NO: 59001 - DNA, 20 bp, synthetic construct
  misc_feature 1..20: note = chemically synthesized
  source 1..20: mol_type = other DNA
caggacagagtctacatcca

SEQ ID NO: 59002 - DNA, 20 bp, synthetic construct
  misc_feature 1..20: note = chemically synthesized
  source 1..20: mol_type = other DNA
acgatgattcttgcaaagat

SEQ ID NO: 59003 - DNA, 20 bp, synthetic construct
  misc_feature 1..20: note = chemically synthesized
  source 1..20: mol_type = other DNA
aatcttggtgctctagctat

SEQ ID NO: 59004 - DNA, 20 bp, synthetic construct
  misc_feature 1..20: note = chemically synthesized
  source 1..20: mol_type = other DNA
cctgggcaacaaagcaagac

SEQ ID NO: 59005 - DNA, 20 bp, synthetic construct
  misc_feature 1..20: note = chemically synthesized
  source 1..20: mol_type = other DNA
ttctacacaaaaatttaaaa

SEQ ID NO: 59006 - DNA, 20 bp, synthetic construct
  misc_feature 1..20: note = chemically synthesized
  source 1..20: mol_type = other DNA
ctattcaggaggctgaggca

SEQ ID NO: 59007 - DNA, 20 bp, synthetic construct
  misc_feature 1..20: note = chemically synthesized
  source 1..20: mol_type = other DNA
tcaggaggctgaggcaggag

SEQ ID NO: 59008 - DNA, 20 bp, synthetic construct
  misc_feature 1..20: note = chemically synthesized
  source 1..20: mol_type = other DNA
attagagtctagggtctgcc

SEQ ID NO: 59009 - DNA, 20 bp, synthetic construct
  misc_feature 1..20: note = chemically synthesized
  source 1..20: mol_type = other DNA
gtctcttagggccagaaagt

SEQ ID NO: 59010 - DNA, 20 bp, synthetic construct
  misc_feature 1..20: note = chemically synthesized
  source 1..20: mol_type = other DNA
aaagtaatcgtttttgaatg

SEQ ID NO: 59011 - DNA, 20 bp, synthetic construct
  misc_feature 1..20: note = chemically synthesized
  source 1..20: mol_type = other DNA
cttaaagttacagcccttgg

SEQ ID NO: 59012 - DNA, 20 bp, synthetic construct
  misc_feature 1..20: note = chemically synthesized
  source 1..20: mol_type = other DNA
ttttctatcttttgtagaga

SEQ ID NO: 59013 - DNA, 20 bp, synthetic construct
  misc_feature 1..20: note = chemically synthesized
  source 1..20: mol_type = other DNA
agctcaagagatctgccagt

SEQ ID NO: 59014 - DNA, 20 bp, synthetic construct
  misc_feature 1..20: note = chemically synthesized
  source 1..20: mol_type = other DNA
agtcttggcttcccaaagct

SEQ ID NO: 59015 - DNA, 20 bp, synthetic construct
  misc_feature 1..20: note = chemically synthesized
  source 1..20: mol_type = other DNA
gtgaaccaccatgcctggcc

SEQ ID NO: 59016 - DNA, 20 bp, synthetic construct
  misc_feature 1..20: note = chemically synthesized
  source 1..20: mol_type = other DNA
ctggccaagtgttttaactc

SEQ ID NO: 59017 - DNA, 20 bp, synthetic construct
  misc_feature 1..20: note = chemically synthesized
  source 1..20: mol_type = other DNA
aaatggtaactggagactta

SEQ ID NO: 59018 - DNA, 20 bp, synthetic construct
  misc_feature 1..20: note = chemically synthesized
  source 1..20: mol_type = other DNA
actttcagttatttttgaaa

SEQ ID NO: 59019 - DNA, 20 bp, synthetic construct
  misc_feature 1..20: note = chemically synthesized
  source 1..20: mol_type = other DNA
tgaaaaagggcttctatatc

SEQ ID NO: 59020 - DNA, 20 bp, synthetic construct
  misc_feature 1..20: note = chemically synthesized
  source 1..20: mol_type = other DNA
taaaaaatagggctatttaa

SEQ ID NO: 59021 - DNA, 20 bp, synthetic construct
  misc_feature 1..20: note = chemically synthesized
  source 1..20: mol_type = other DNA
gcccaggctggtctcaaatt

SEQ ID NO: 59022 - DNA, 20 bp, synthetic construct
  misc_feature 1..20: note = chemically synthesized
  source 1..20: mol_type = other DNA
cgcctcaacctagcaaagca

SEQ ID NO: 59023 - DNA, 20 bp, synthetic construct
  misc_feature 1..20: note = chemically synthesized
  source 1..20: mol_type = other DNA
gataagagccagggggaata

SEQ ID NO: 59024 - DNA, 20 bp, synthetic construct
  misc_feature 1..20: note = chemically synthesized
  source 1..20: mol_type = other DNA
ttgacagcattccatgctgg

SEQ ID NO: 59025 - DNA, 20 bp, synthetic construct
  misc_feature 1..20: note = chemically synthesized
  source 1..20: mol_type = other DNA
actccagttgtccttgactg

SEQ ID NO: 59026 - DNA, 20 bp, synthetic construct
  misc_feature 1..20: note = chemically synthesized
  source 1..20: mol_type = other DNA
attgcagtgacctctgggat

SEQ ID NO: 59027 - DNA, 20 bp, synthetic construct
  misc_feature 1..20: note = chemically synthesized
  source 1..20: mol_type = other DNA
tggtcagcatatggggaggg

SEQ ID NO: 59028 - DNA, 20 bp, synthetic construct
  misc_feature 1..20: note = chemically synthesized
  source 1..20: mol_type = other DNA
ctttccacctgccagcccct

SEQ ID NO: 59029 - DNA, 20 bp, synthetic construct
  misc_feature 1..20: note = chemically synthesized
  source 1..20: mol_type = other DNA
gcccctttctgcttcctcca

SEQ ID NO: 59030 - DNA, 20 bp, synthetic construct
  misc_feature 1..20: note = chemically synthesized
  source 1..20: mol_type = other DNA
cgtgggaaaacaggtgaggc

SEQ ID NO: 59031 - DNA, 20 bp, synthetic construct
  misc_feature 1..20: note = chemically synthesized
  source 1..20: mol_type = other DNA
agctgactgcatcgagacac

SEQ ID NO: 59032 - DNA, 20 bp, synthetic construct
  misc_feature 1..20: note = chemically synthesized
  source 1..20: mol_type = other DNA
gatatatgaggcgagtggct

SEQ ID NO: 59033 - DNA, 20 bp, synthetic construct
  misc_feature 1..20: note = chemically synthesized
  source 1..20: mol_type = other DNA
tgctgagaatccactcattt

SEQ ID NO: 59034 - DNA, 20 bp, synthetic construct
  misc_feature 1..20: note = chemically synthesized
  source 1..20: mol_type = other DNA
ctcactgcagcctcagtctc

SEQ ID NO: 59035 - DNA, 20 bp, synthetic construct
  misc_feature 1..20: note = chemically synthesized
  source 1..20: mol_type = other DNA
tcagtctcctgggcttaagg

SEQ ID NO: 59036 - DNA, 22 bp, synthetic construct
  misc_feature 1..22: note = chemically synthesized
  source 1..22: mol_type = other DNA
gctgggtttggtggtgtgcgcc

SEQ ID NO: 59037 - DNA, 22 bp, synthetic construct
  misc_feature 1..22: note = chemically synthesized
  source 1..22: mol_type = other DNA
ggtttggtggtgtgcgcctgta

SEQ ID NO: 59038 - DNA, 22 bp, synthetic construct
  misc_feature 1..22: note = chemically synthesized
  source 1..22: mol_type = other DNA
ggtggtgtgcgcctgtaggccc

SEQ ID NO: 59039 - DNA, 22 bp, synthetic construct
  misc_feature 1..22: note = chemically synthesized
  source 1..22: mol_type = other DNA
gtggtgtgcgcctgtaggccca

SEQ ID NO: 59040 - DNA, 22 bp, synthetic construct
  misc_feature 1..22: note = chemically synthesized
  source 1..22: mol_type = other DNA
taggcccagctacccagagact

SEQ ID NO: 59041 - DNA, 22 bp, synthetic construct
  misc_feature 1..22: note = chemically synthesized
  source 1..22: mol_type = other DNA
cccagagactgatgcaaaacga

SEQ ID NO: 59042 - DNA, 22 bp, synthetic construct
  misc_feature 1..22: note = chemically synthesized
  source 1..22: mol_type = other DNA
atgcaaaacgatcccttaagcc

SEQ ID NO: 59043 - DNA, 22 bp, synthetic construct
  misc_feature 1..22: note = chemically synthesized
  source 1..22: mol_type = other DNA
aagcccaggagactgaggctgc

SEQ ID NO: 59044 - DNA, 22 bp, synthetic construct
  misc_feature 1..22: note = chemically synthesized
  source 1..22: mol_type = other DNA
agcccaggagactgaggctgca

SEQ ID NO: 59045 - DNA, 22 bp, synthetic construct
  misc_feature 1..22: note = chemically synthesized
  source 1..22: mol_type = other DNA
aggctgcagtgagctgtgatgg

SEQ ID NO: 59046 - DNA, 22 bp, synthetic construct
  misc_feature 1..22: note = chemically synthesized
  source 1..22: mol_type = other DNA
cagtgagctgtgatggtgccac

SEQ ID NO: 59047 - DNA, 22 bp, synthetic construct
  misc_feature 1..22: note = chemically synthesized
  source 1..22: mol_type = other DNA
tgatggtgccaccgcactccag

SEQ ID NO: 59048 - DNA, 22 bp, synthetic construct
  misc_feature 1..22: note = chemically synthesized
  source 1..22: mol_type = other DNA
cagcctgggtaacagagtgaga

SEQ ID NO: 59049 - DNA, 22 bp, synthetic construct
  misc_feature 1..22: note = chemically synthesized
  source 1..22: mol_type = other DNA
ggtaacagagtgagaccccgtc

SEQ ID NO: 59050 - DNA, 22 bp, synthetic construct
  misc_feature 1..22: note = chemically synthesized
  source 1..22: mol_type = other DNA
aaataaacagataaatgagtgg

SEQ ID NO: 59051 - DNA, 22 bp, synthetic construct
  misc_feature 1..22: note = chemically synthesized
  source 1..22: mol_type = other DNA
tcagcaaaacttctagccactc

SEQ ID NO: 59052 - DNA, 22 bp, synthetic construct
  misc_feature 1..22: note = chemically synthesized
  source 1..22: mol_type = other DNA
agcaaaacttctagccactcgc

SEQ ID NO: 59053 - DNA, 22 bp, synthetic construct
  misc_feature 1..22: note = chemically synthesized
  source 1..22: mol_type = other DNA
ctagccactcgcctcatatatc

SEQ ID NO: 59054 - DNA, 22 bp, synthetic construct
  misc_feature 1..22: note = chemically synthesized
  source 1..22: mol_type = other DNA
tagccactcgcctcatatatcc

SEQ ID NO: 59055 - DNA, 22 bp, synthetic construct
  misc_feature 1..22: note = chemically synthesized
  source 1..22: mol_type = other DNA
gccactcgcctcatatatccac

SEQ ID NO: 59056 - DNA, 22 bp, synthetic construct
  misc_feature 1..22: note = chemically synthesized
  source 1..22: mol_type = other DNA
gcctcatatatccacaagacct

SEQ ID NO: 59057 - DNA, 22 bp, synthetic construct
  misc_feature 1..22: note = chemically synthesized
  source 1..22: mol_type = other DNA
atatatccacaagacctttgag

SEQ ID NO: 59058 - DNA, 22 bp, synthetic construct
  misc_feature 1..22: note = chemically synthesized
  source 1..22: mol_type = other DNA
tgagaatccacggtgtctcgat

SEQ ID NO: 59059 - DNA, 22 bp, synthetic construct
  misc_feature 1..22: note = chemically synthesized
  source 1..22: mol_type = other DNA
gagaatccacggtgtctcgatg

SEQ ID NO: 59060 - DNA, 22 bp, synthetic construct
  misc_feature 1..22: note = chemically synthesized
  source 1..22: mol_type = other DNA
agaatccacggtgtctcgatgc

SEQ ID NO: 59061 - DNA, 22 bp, synthetic construct
  misc_feature 1..22: note = chemically synthesized
  source 1..22: mol_type = other DNA
gatgcagtcagctttctaacaa

SEQ ID NO: 59062 - DNA, 22 bp, synthetic construct
  misc_feature 1..22: note = chemically synthesized
  source 1..22: mol_type = other DNA
tctaacaagctggggcctcacc

SEQ ID NO: 59063 - DNA, 22 bp, synthetic construct
  misc_feature 1..22: note = chemically synthesized
  source 1..22: mol_type = other DNA
ctaacaagctggggcctcacct

SEQ ID NO: 59064 - DNA, 22 bp, synthetic construct
  misc_feature 1..22: note = chemically synthesized
  source 1..22: mol_type = other DNA
taacaagctggggcctcacctg

SEQ ID NO: 59065 - DNA, 22 bp, synthetic construct
  misc_feature 1..22: note = chemically synthesized
  source 1..22: mol_type = other DNA
acaagctggggcctcacctgtt

SEQ ID NO: 59066 - DNA, 22 bp, synthetic construct
  misc_feature 1..22: note = chemically synthesized
  source 1..22: mol_type = other DNA
gggcctcacctgttttcccacg

SEQ ID NO: 59067 - DNA, 22 bp, synthetic construct
  misc_feature 1..22: note = chemically synthesized
  source 1..22: mol_type = other DNA
acctgttttcccacggataaaa

SEQ ID NO: 59068 - DNA, 22 bp, synthetic construct
  misc_feature 1..22: note = chemically synthesized
  source 1..22: mol_type = other DNA
ttttcccacggataaaaacgtg

SEQ ID NO: 59069 - DNA, 22 bp, synthetic construct
  misc_feature 1..22: note = chemically synthesized
  source 1..22: mol_type = other DNA
tcccacggataaaaacgtgctg

SEQ ID NO: 59070 - DNA, 22 bp, synthetic construct
  misc_feature 1..22: note = chemically synthesized
  source 1..22: mol_type = other DNA
cccacggataaaaacgtgctgg

SEQ ID NO: 59071 - DNA, 22 bp, synthetic construct
  misc_feature 1..22: note = chemically synthesized
  source 1..22: mol_type = other DNA
ccacggataaaaacgtgctgga

SEQ ID NO: 59072 - DNA, 22 bp, synthetic construct
  misc_feature 1..22: note = chemically synthesized
  source 1..22: mol_type = other DNA
gaggaagcagaaaggggctggc

SEQ ID NO: 59073 - DNA, 22 bp, synthetic construct
  misc_feature 1..22: note = chemically synthesized
  source 1..22: mol_type = other DNA
gcaggtggaaagatgaggacca

SEQ ID NO: 59074 - DNA, 22 bp, synthetic construct
  misc_feature 1..22: note = chemically synthesized
  source 1..22: mol_type = other DNA
atcgtctcatgactatgaggtt

SEQ ID NO: 59075 - DNA, 22 bp, synthetic construct
  misc_feature 1..22: note = chemically synthesized
  source 1..22: mol_type = other DNA
atgactatgaggttgctctgat

SEQ ID NO: 59076 - DNA, 22 bp, synthetic construct
  misc_feature 1..22: note = chemically synthesized
  source 1..22: mol_type = other DNA
tgaggttgctctgatccagagg

SEQ ID NO: 59077 - DNA, 22 bp, synthetic construct
  misc_feature 1..22: note = chemically synthesized
  source 1..22: mol_type = other DNA
ctctgatccagagggtccccct

SEQ ID NO: 59078 - DNA, 22 bp, synthetic construct
  misc_feature 1..22: note = chemically synthesized
  source 1..22: mol_type = other DNA
tgatccagagggtccccctgcc

SEQ ID NO: 59079 - DNA, 22 bp, synthetic construct
  misc_feature 1..22: note = chemically synthesized
  source 1..22: mol_type = other DNA
atccagagggtccccctgcctg

SEQ ID NO: 59080 - DNA, 22 bp, synthetic construct
  misc_feature 1..22: note = chemically synthesized
  source 1..22: mol_type = other DNA
cctggtggcccaccgccaggaa

SEQ ID NO: 59081 - DNA, 22 bp, synthetic construct
  misc_feature 1..22: note = chemically synthesized
  source 1..22: mol_type = other DNA
gtggcccaccgccaggaagact

SEQ ID NO: 59082 - DNA, 22 bp, synthetic construct
  misc_feature 1..22: note = chemically synthesized
  source 1..22: mol_type = other DNA
ccactgtccctggatgcccaga

SEQ ID NO: 59083 - DNA, 22 bp, synthetic construct
  misc_feature 1..22: note = chemically synthesized
  source 1..22: mol_type = other DNA
tccctggatgcccagagtggga

SEQ ID NO: 59084 - DNA, 22 bp, synthetic construct
  misc_feature 1..22: note = chemically synthesized
  source 1..22: mol_type = other DNA
gatgcccagagtgggatgtcaa

SEQ ID NO: 59085 - DNA, 22 bp, synthetic construct
  misc_feature 1..22: note = chemically synthesized
  source 1..22: mol_type = other DNA
catcacttatcaactccttatc

SEQ ID NO: 59086 - DNA, 22 bp, synthetic construct
  misc_feature 1..22: note = chemically synthesized
  source 1..22: mol_type = other DNA
atcaactccttatccatagggg

SEQ ID NO: 59087 - DNA, 22 bp, synthetic construct
  misc_feature 1..22: note = chemically synthesized
  source 1..22: mol_type = other DNA
tcaactccttatccataggggt

SEQ ID NO: 59088 - DNA, 22 bp, synthetic construct
  misc_feature 1..22: note = chemically synthesized
  source 1..22: mol_type = other DNA
cttatccataggggtattcttc

SEQ ID NO: 59089 - DNA, 22 bp, synthetic construct
  misc_feature 1..22: note = chemically synthesized
  source 1..22: mol_type = other DNA
atccataggggtattcttcctg

SEQ ID NO: 59090 - DNA, 22 bp, synthetic construct
  misc_feature 1..22: note = chemically synthesized
  source 1..22: mol_type = other DNA
tccataggggtattcttcctga

SEQ ID NO: 59091 - DNA, 22 bp, synthetic construct
  misc_feature 1..22: note = chemically synthesized
  source 1..22: mol_type = other DNA
ttcctgaggcgtctcagaaaac

SEQ ID NO: 59092 - DNA, 22 bp, synthetic construct
  misc_feature 1..22: note = chemically synthesized
  source 1..22: mol_type = other DNA
cctgaggcgtctcagaaaacag

SEQ ID NO: 59093 - DNA, 22 bp, synthetic construct
  misc_feature 1..22: note = chemically synthesized
  source 1..22: mol_type = other DNA
ctgaggcgtctcagaaaacagg

SEQ ID NO: 59094 - DNA, 22 bp, synthetic construct
  misc_feature 1..22: note = chemically synthesized
  source 1..22: mol_type = other DNA
aggcgtctcagaaaacagggcc

SEQ ID NO: 59095 - DNA, 22 bp, synthetic construct
  misc_feature 1..22: note = chemically synthesized
  source 1..22: mol_type = other DNA
agaaaacagggccctccccata

SEQ ID NO: 59096 - DNA, 22 bp, synthetic construct
  misc_feature 1..22: note = chemically synthesized
  source 1..22: mol_type = other DNA
cccatatgctgaccacataata

SEQ ID NO: 59097 - DNA, 22 bp, synthetic construct
  misc_feature 1..22: note = chemically synthesized
  source 1..22: mol_type = other DNA
accacataatagaacccctccc

SEQ ID NO: 59098 - DNA, 22 bp, synthetic construct
  misc_feature 1..22: note = chemically synthesized
  source 1..22: mol_type = other DNA
ccaactcagagaccctggctgc

SEQ ID NO: 59099 - DNA, 22 bp, synthetic construct
  misc_feature 1..22: note = chemically synthesized
  source 1..22: mol_type = other DNA
agagaccctggctgctagctgc

SEQ ID NO: 59100 - DNA, 22 bp, synthetic construct
  misc_feature 1..22: note = chemically synthesized
  source 1..22: mol_type = other DNA
gctgctagctgccctggcatga

SEQ ID NO: 59101 - DNA, 22 bp, synthetic construct
  misc_feature 1..22: note = chemically synthesized
  source 1..22: mol_type = other DNA
ctagctgccctggcatgaccca

SEQ ID NO: 59102 - DNA, 22 bp, synthetic construct
  misc_feature 1..22: note = chemically synthesized
  source 1..22: mol_type = other DNA
gctgccctggcatgacccagac

SEQ ID NO: 59103 - DNA, 22 bp, synthetic construct
  misc_feature 1..22: note = chemically synthesized
  source 1..22: mol_type = other DNA
ccctggcatgacccagacagtg

SEQ ID NO: 59104 - DNA, 22 bp, synthetic construct
  misc_feature 1..22: note = chemically synthesized
  source 1..22: mol_type = other DNA
gcatgacccagacagtggcctt

SEQ ID NO: 59105 - DNA, 22 bp, synthetic construct
  misc_feature 1..22: note = chemically synthesized
  source 1..22: mol_type = other DNA
tgtatatgtttttagactcacc

SEQ ID NO: 59106 - DNA, 22 bp, synthetic construct
  misc_feature 1..22: note = chemically synthesized
  source 1..22: mol_type = other DNA
gtatatgtttttagactcacct

SEQ ID NO: 59107 - DNA, 22 bp, synthetic construct
  misc_feature 1..22: note = chemically synthesized
  source 1..22: mol_type = other DNA
tatatgtttttagactcacctt

SEQ ID NO: 59108 - DNA, 22 bp, synthetic construct
  misc_feature 1..22: note = chemically synthesized
  source 1..22: mol_type = other DNA
ttagactcaccttgactcacct

SEQ ID NO: 59109 - DNA, 22 bp, synthetic construct
  misc_feature 1..22: note = chemically synthesized
  source 1..22: mol_type = other DNA
tagactcaccttgactcacctc

SEQ ID NO: 59110 - DNA, 22 bp, synthetic construct
  misc_feature 1..22: note = chemically synthesized
  source 1..22: mol_type = other DNA
agactcaccttgactcacctct

SEQ ID NO: 59111 - DNA, 22 bp, synthetic construct
  misc_feature 1..22: note = chemically synthesized
  source 1..22: mol_type = other DNA
gactcaccttgactcacctctg

SEQ ID NO: 59112 - DNA, 22 bp, synthetic construct
  misc_feature 1..22: note = chemically synthesized
  source 1..22: mol_type = other DNA
accttgactcacctctgaccat

SEQ ID NO: 59113 - DNA, 22 bp, synthetic construct
  misc_feature 1..22: note = chemically synthesized
  source 1..22: mol_type = other DNA
gactcacctctgaccatagaaa

SEQ ID NO: 59114 - DNA, 22 bp, synthetic construct
  misc_feature 1..22: note = chemically synthesized
  source 1..22: mol_type = other DNA
actcacctctgaccatagaaac

SEQ ID NO: 59115 - DNA, 22 bp, synthetic construct
  misc_feature 1..22: note = chemically synthesized
  source 1..22: mol_type = other DNA
acctctgaccatagaaactctc

SEQ ID NO: 59116 - DNA, 22 bp, synthetic construct
  misc_feature 1..22: note = chemically synthesized
  source 1..22: mol_type = other DNA
tgaccatagaaactctcatccc

SEQ ID NO: 59117 - DNA, 22 bp, synthetic construct
  misc_feature 1..22: note = chemically synthesized
  source 1..22: mol_type = other DNA
accatagaaactctcatcccag

SEQ ID NO: 59118 - DNA, 22 bp, synthetic construct
  misc_feature 1..22: note = chemically synthesized
  source 1..22: mol_type = other DNA
tcatcccagaggtcactgcaat

SEQ ID NO: 59119 - DNA, 22 bp, synthetic construct
  misc_feature 1..22: note = chemically synthesized
  source 1..22: mol_type = other DNA
atcccagaggtcactgcaatag

SEQ ID NO: 59120 - DNA, 22 bp, synthetic construct
  misc_feature 1..22: note = chemically synthesized
  source 1..22: mol_type = other DNA
caatagttactccacaacagag

SEQ ID NO: 59121 - DNA, 22 bp, synthetic construct
  misc_feature 1..22: note = chemically synthesized
  source 1..22: mol_type = other DNA
ctccacaacagaggcttatctg

SEQ ID NO: 59122 - DNA, 22 bp, synthetic construct
  misc_feature 1..22: note = chemically synthesized
  source 1..22: mol_type = other DNA
cacaacagaggcttatctgggt

SEQ ID NO: 59123 - DNA, 22 bp, synthetic construct
  misc_feature 1..22: note = chemically synthesized
  source 1..22: mol_type = other DNA
atctgggtagagggaggctccc

SEQ ID NO: 59124 - DNA, 22 bp, synthetic construct
  misc_feature 1..22: note = chemically synthesized
  source 1..22: mol_type = other DNA
tctgggtagagggaggctccct

SEQ ID NO: 59125 - DNA, 22 bp, synthetic construct
  misc_feature 1..22: note = chemically synthesized
  source 1..22: mol_type = other DNA
ggtagagggaggctccctacct

SEQ ID NO: 59126 - DNA, 22 bp, synthetic construct
  misc_feature 1..22: note = chemically synthesized
  source 1..22: mol_type = other DNA
cctacctatggcccagcagccc

SEQ ID NO: 59127 - DNA, 22 bp, synthetic construct
  misc_feature 1..22: note = chemically synthesized
  source 1..22: mol_type = other DNA
cctatggcccagcagccctgac

SEQ ID NO: 59128 - DNA, 22 bp, synthetic construct
  misc_feature 1..22: note = chemically synthesized
  source 1..22: mol_type = other DNA
tggcccagcagccctgacagtg

SEQ ID NO: 59129 - DNA, 22 bp, synthetic construct
  misc_feature 1..22: note = chemically synthesized
  source 1..22: mol_type = other DNA
acagtgcagatcacatataccc

SEQ ID NO: 59130 - DNA, 22 bp, synthetic construct
  misc_feature 1..22: note = chemically synthesized
  source 1..22: mol_type = other DNA
cctgccacgcatgggcttactt

SEQ ID NO: 59131 - DNA, 22 bp, synthetic construct
  misc_feature 1..22: note = chemically synthesized
  source 1..22: mol_type = other DNA
ccacgcatgggcttactttaca

SEQ ID NO: 59132 - DNA, 22 bp, synthetic construct
  misc_feature 1..22: note = chemically synthesized
  source 1..22: mol_type = other DNA
actttacacccacccacagtca

SEQ ID NO: 59133 - DNA, 22 bp, synthetic construct
  misc_feature 1..22: note = chemically synthesized
  source 1..22: mol_type = other DNA
ctttacacccacccacagtcac

SEQ ID NO: 59134 - DNA, 22 bp, synthetic construct
  misc_feature 1..22: note = chemically synthesized
  source 1..22: mol_type = other DNA
tacacccacccacagtcaccaa

SEQ ID NO: 59135 - DNA, 22 bp, synthetic construct
  misc_feature 1..22: note = chemically synthesized
  source 1..22: mol_type = other DNA
acacccacccacagtcaccaac

SEQ ID NO: 59136 - DNA, 22 bp, synthetic construct
  misc_feature 1..22: note = chemically synthesized
  source 1..22: mol_type = other DNA
cacccacccacagtcaccaaca

SEQ ID NO: 59137 - DNA, 22 bp, synthetic construct
  misc_feature 1..22: note = chemically synthesized
  source 1..22: mol_type = other DNA
cctgctctccaaggttaggcgt

SEQ ID NO: 59138 - DNA, 22 bp, synthetic construct
  misc_feature 1..22: note = chemically synthesized
  source 1..22: mol_type = other DNA
ctctccaaggttaggcgtggca

SEQ ID NO: 59139 - DNA, 22 bp, synthetic construct
  misc_feature 1..22: note = chemically synthesized
  source 1..22: mol_type = other DNA
tccaaggttaggcgtggcagga

SEQ ID NO: 59140 - DNA, 22 bp, synthetic construct
  misc_feature 1..22: note = chemically synthesized
  source 1..22: mol_type = other DNA
caaggttaggcgtggcaggaga

SEQ ID NO: 59141 - DNA, 22 bp, synthetic construct
  misc_feature 1..22: note = chemically synthesized
  source 1..22: mol_type = other DNA
ggcgtggcaggagaagtttgct

SEQ ID NO: 59142 - DNA, 22 bp, synthetic construct
  misc_feature 1..22: note = chemically synthesized
  source 1..22: mol_type = other DNA
gcttggaccagcagaaaccatg

SEQ ID NO: 59143 - DNA, 22 bp, synthetic construct
  misc_feature 1..22: note = chemically synthesized
  source 1..22: mol_type = other DNA
cttggaccagcagaaaccatgc

SEQ ID NO: 59144 - DNA, 22 bp, synthetic construct
  misc_feature 1..22: note = chemically synthesized
  source 1..22: mol_type = other DNA
ggaccagcagaaaccatgcagt

SEQ ID NO: 59145 - DNA, 22 bp, synthetic construct
  misc_feature 1..22: note = chemically synthesized
  source 1..22: mol_type = other DNA
gaccagcagaaaccatgcagtc

SEQ ID NO: 59146 - DNA, 22 bp, synthetic construct
  misc_feature 1..22: note = chemically synthesized
  source 1..22: mol_type = other DNA
gagtcagcatgggctgggtgcg

SEQ ID NO: 59147 - DNA, 22 bp, synthetic construct
  misc_feature 1..22: note = chemically synthesized
  source 1..22: mol_type = other DNA
ggtgcgagcccttggtggggtg

SEQ ID NO: 59148 - DNA, 22 bp, synthetic construct
  misc_feature 1..22: note = chemically synthesized
  source 1..22: mol_type = other DNA
ggtggggtggggaggagactcc

SEQ ID NO: 59149 - DNA, 22 bp, synthetic construct
  misc_feature 1..22: note = chemically synthesized
  source 1..22: mol_type = other DNA
gtggggtggggaggagactcca

SEQ ID NO: 59150 - DNA, 22 bp, synthetic construct
  misc_feature 1..22: note = chemically synthesized
  source 1..22: mol_type = other DNA
caggtcatacctcctggaggat

SEQ ID NO: 59151 - DNA, 22 bp, synthetic construct
  misc_feature 1..22: note = chemically synthesized
  source 1..22: mol_type = other DNA
ctggaggatgttttaatcattt

SEQ ID NO: 59152 - DNA, 22 bp, synthetic construct
  misc_feature 1..22: note = chemically synthesized
  source 1..22: mol_type = other DNA
gaggatgttttaatcatttcca

SEQ ID NO: 59153 - DNA, 22 bp, synthetic construct
  misc_feature 1..22: note = chemically synthesized
  source 1..22: mol_type = other DNA
taatcatttccagcatggaatg

SEQ ID NO: 59154 - DNA, 22 bp, synthetic construct
  misc_feature 1..22: note = chemically synthesized
  source 1..22: mol_type = other DNA
aatcatttccagcatggaatgc

SEQ ID NO: 59155 - DNA, 22 bp, synthetic construct
  misc_feature 1..22: note = chemically synthesized
  source 1..22: mol_type = other DNA
atcatttccagcatggaatgct

SEQ ID NO: 59156 - DNA, 22 bp, synthetic construct
  misc_feature 1..22: note = chemically synthesized
  source 1..22: mol_type = other DNA
ccagcatggaatgctgtcaact

SEQ ID NO: 59157 - DNA, 22 bp, synthetic construct
  misc_feature 1..22: note = chemically synthesized
  source 1..22: mol_type = other DNA
cagcatggaatgctgtcaactt

SEQ ID NO: 59158 - DNA, 22 bp, synthetic construct
  misc_feature 1..22: note = chemically synthesized
  source 1..22: mol_type = other DNA
tcaacttttgccacagattcat

SEQ ID NO: 59159 - DNA, 22 bp, synthetic construct
  misc_feature 1..22: note = chemically synthesized
  source 1..22: mol_type = other DNA
ttgccacagattcattagctct

SEQ ID NO: 59160 - DNA, 22 bp, synthetic construct
  misc_feature 1..22: note = chemically synthesized
  source 1..22: mol_type = other DNA
tgccacagattcattagctctg

SEQ ID NO: 59161 - DNA, 22 bp, synthetic construct
  misc_feature 1..22: note = chemically synthesized
  source 1..22: mol_type = other DNA
gccacagattcattagctctga

SEQ ID NO: 59162 - DNA, 22 bp, synthetic construct
  misc_feature 1..22: note = chemically synthesized
  source 1..22: mol_type = other DNA
ccacagattcattagctctgag

SEQ ID NO: 59163 - DNA, 22 bp, synthetic construct
  misc_feature 1..22: note = chemically synthesized
  source 1..22: mol_type = other DNA
attagctctgagtttctttttt

SEQ ID NO: 59164 - DNA, 22 bp, synthetic construct
  misc_feature 1..22: note = chemically synthesized
  source 1..22: mol_type = other DNA
gctctgagtttcttttttctgt

SEQ ID NO: 59165 - DNA, 22 bp, synthetic construct
  misc_feature 1..22: note = chemically synthesized
  source 1..22: mol_type = other DNA
tgagtttcttttttctgtcccc

SEQ ID NO: 59166 - DNA, 22 bp, synthetic construct
  misc_feature 1..22: note = chemically synthesized
  source 1..22: mol_type = other DNA
agtttcttttttctgtccccag

SEQ ID NO: 59167 - DNA, 22 bp, synthetic construct
  misc_feature 1..22: note = chemically synthesized
  source 1..22: mol_type = other DNA
cttttttctgtccccagctacc

SEQ ID NO: 59168 - DNA, 22 bp, synthetic construct
  misc_feature 1..22: note = chemically synthesized
  source 1..22: mol_type = other DNA
ttttttctgtccccagctaccc

SEQ ID NO: 59169 - DNA, 22 bp, synthetic construct
  misc_feature 1..22: note = chemically synthesized
  source 1..22: mol_type = other DNA
ttttctgtccccagctacccct

SEQ ID NO: 59170 - DNA, 22 bp, synthetic construct
  misc_feature 1..22: note = chemically synthesized
  source 1..22: mol_type = other DNA
tttctgtccccagctacccctt

SEQ ID NO: 59171 - DNA, 22 bp, synthetic construct
  misc_feature 1..22: note = chemically synthesized
  source 1..22: mol_type = other DNA
ttctgtccccagctacccctta

SEQ ID NO: 59172 - DNA, 22 bp, synthetic construct
  misc_feature 1..22: note = chemically synthesized
  source 1..22: mol_type = other DNA
tctgtccccagctaccccttac

SEQ ID NO: 59173 - DNA, 22 bp, synthetic construct
  misc_feature 1..22: note = chemically synthesized
  source 1..22: mol_type = other DNA
ctgtccccagctaccccttaca

SEQ ID NO: 59174 - DNA, 22 bp, synthetic construct
  misc_feature 1..22: note = chemically synthesized
  source 1..22: mol_type = other DNA
tgtccccagctaccccttacat

SEQ ID NO: 59175 - DNA, 22 bp, synthetic construct
  misc_feature 1..22: note = chemically synthesized
  source 1..22: mol_type = other DNA
tccccagctaccccttacatgt

SEQ ID NO: 59176 - DNA, 22 bp, synthetic construct
  misc_feature 1..22: note = chemically synthesized
  source 1..22: mol_type = other DNA
ccccttacatgtcaatatggac

SEQ ID NO: 59177 - DNA, 22 bp, synthetic construct
  misc_feature 1..22: note = chemically synthesized
  source 1..22: mol_type = other DNA
acatgtcaatatggacttaatg

SEQ ID NO: 59178 - DNA, 22 bp, synthetic construct
  misc_feature 1..22: note = chemically synthesized
  source 1..22: mol_type = other DNA
catgtcaatatggacttaatga

SEQ ID NO: 59179 - DNA, 22 bp, synthetic construct
  misc_feature 1..22: note = chemically synthesized
  source 1..22: mol_type = other DNA
aatgatgggaaattcaggcaag

SEQ ID NO: 59180 - DNA, 22 bp, synthetic construct
  misc_feature 1..22: note = chemically synthesized
  source 1..22: mol_type = other DNA
atgatgggaaattcaggcaagt

SEQ ID NO: 59181 - DNA, 22 bp, synthetic construct
  misc_feature 1..22: note = chemically synthesized
  source 1..22: mol_type = other DNA
aggcaagtttttaaacatttta

SEQ ID NO: 59182 - DNA, 22 bp, synthetic construct
  misc_feature 1..22: note = chemically synthesized
  source 1..22: mol_type = other DNA
ttaaacattttattccccctgg

SEQ ID NO: 59183 - DNA, 22 bp, synthetic construct
  misc_feature 1..22: note = chemically synthesized
  source 1..22: mol_type = other DNA
taaacattttattccccctggc

SEQ ID NO: 59184 - DNA, 22 bp, synthetic construct
  misc_feature 1..22: note = chemically synthesized
  source 1..22: mol_type = other DNA
aaacattttattccccctggct

SEQ ID NO: 59185 - DNA, 22 bp, synthetic construct
  misc_feature 1..22: note = chemically synthesized
  source 1..22: mol_type = other DNA
aacattttattccccctggctc

SEQ ID NO: 59186 - DNA, 22 bp, synthetic construct
  misc_feature 1..22: note = chemically synthesized
  source 1..22: mol_type = other DNA
tattccccctggctcttatcct

SEQ ID NO: 59187 - DNA, 22 bp, synthetic construct
  misc_feature 1..22: note = chemically synthesized
  source 1..22: mol_type = other DNA
attccccctggctcttatcctc

SEQ ID NO: 59188 - DNA, 22 bp, synthetic construct
  misc_feature 1..22: note = chemically synthesized
  source 1..22: mol_type = other DNA
ttccccctggctcttatcctca

SEQ ID NO: 59189 - DNA, 22 bp, synthetic construct
  misc_feature 1..22: note = chemically synthesized
  source 1..22: mol_type = other DNA
cccctggctcttatcctcaaaa

SEQ ID NO: 59190 - DNA, 22 bp, synthetic construct
  misc_feature 1..22: note = chemically synthesized
  source 1..22: mol_type = other DNA
gctcttatcctcaaaaaatgca

SEQ ID NO: 59191 - DNA, 22 bp, synthetic construct
  misc_feature 1..22: note = chemically synthesized
  source 1..22: mol_type = other DNA
ttatcctcaaaaaatgcatgaa

SEQ ID NO: 59192 - DNA, 22 bp, synthetic construct
  misc_feature 1..22: note = chemically synthesized
  source 1..22: mol_type = other DNA
atcctcaaaaaatgcatgaatt

SEQ ID NO: 59193 - DNA, 22 bp, synthetic construct
  misc_feature 1..22: note = chemically synthesized
  source 1..22: mol_type = other DNA
tcctcaaaaaatgcatgaattt

SEQ ID NO: 59194 - DNA, 22 bp, synthetic construct
  misc_feature 1..22: note = chemically synthesized
  source 1..22: mol_type = other DNA
aaaaaatgcatgaatttggagg

SEQ ID NO: 59195 - DNA, 22 bp, synthetic construct
  misc_feature 1..22: note = chemically synthesized
  source 1..22: mol_type = other DNA
ggaggcagtggctcatgcctgt

SEQ ID NO: 59196 - DNA, 22 bp, synthetic construct
  misc_feature 1..22: note = chemically synthesized
  source 1..22: mol_type = other DNA
gaggcagtggctcatgcctgta

SEQ ID NO: 59197 - DNA, 22 bp, synthetic construct
  misc_feature 1..22: note = chemically synthesized
  source 1..22: mol_type = other DNA
atgcctgtaatcccaatgcttt

SEQ ID NO: 59198 - DNA, 22 bp, synthetic construct
  misc_feature 1..22: note = chemically synthesized
  source 1..22: mol_type = other DNA
taatcccaatgctttgctaggt

SEQ ID NO: 59199 - DNA, 22 bp, synthetic construct
  misc_feature 1..22: note = chemically synthesized
  source 1..22: mol_type = other DNA
tgctaggttgaggcgggaggat

SEQ ID NO: 59200 - DNA, 22 bp, synthetic construct
  misc_feature 1..22: note = chemically synthesized
  source 1..22: mol_type = other DNA
gctaggttgaggcgggaggatc

SEQ ID NO: 59201 - DNA, 22 bp, synthetic construct
  misc_feature 1..22: note = chemically synthesized
  source 1..22: mol_type = other DNA
ctaggttgaggcgggaggatca

SEQ ID NO: 59202 - DNA, 22 bp, synthetic construct
  misc_feature 1..22: note = chemically synthesized
  source 1..22: mol_type = other DNA
ggttgaggcgggaggatcactt

SEQ ID NO: 59203 - DNA, 22 bp, synthetic construct
  misc_feature 1..22: note = chemically synthesized
  source 1..22: mol_type = other DNA
aggcgggaggatcacttgaagc

SEQ ID NO: 59204 - DNA, 22 bp, synthetic construct
  misc_feature 1..22: note = chemically synthesized
  source 1..22: mol_type = other DNA
gaagccaggaatttgagaccag

SEQ ID NO: 59205 - DNA, 22 bp, synthetic construct
  misc_feature 1..22: note = chemically synthesized
  source 1..22: mol_type = other DNA
aagccaggaatttgagaccagc

SEQ ID NO: 59206 - DNA, 22 bp, synthetic construct
  misc_feature 1..22: note = chemically synthesized
  source 1..22: mol_type = other DNA
gagaccagcctgggccgcatag

SEQ ID NO: 59207 - DNA, 22 bp, synthetic construct
  misc_feature 1..22: note = chemically synthesized
  source 1..22: mol_type = other DNA
agaccagcctgggccgcatagt

SEQ ID NO: 59208 - DNA, 22 bp, synthetic construct
  misc_feature 1..22: note = chemically synthesized
  source 1..22: mol_type = other DNA
ggccgcatagtgagaccccgtt

SEQ ID NO: 59209 - DNA, 22 bp, synthetic construct
  misc_feature 1..22: note = chemically synthesized
  source 1..22: mol_type = other DNA
ctacaaaaataaataaataaat

SEQ ID NO: 59210 - DNA, 22 bp, synthetic construct
  misc_feature 1..22: note = chemically synthesized
  source 1..22: mol_type = other DNA
tacaaaaataaataaataaata

SEQ ID NO: 59211 - DNA, 22 bp, synthetic construct
  misc_feature 1..22: note = chemically synthesized
  source 1..22: mol_type = other DNA
caaaaataaataaataaataat

SEQ ID NO: 59212 - DNA, 22 bp, synthetic construct
  misc_feature 1..22: note = chemically synthesized
  source 1..22: mol_type = other DNA
aatagccctattttttaaaatg

SEQ ID NO: 59213 - DNA, 22 bp, synthetic construct
  misc_feature 1..22: note = chemically synthesized
  source 1..22: mol_type = other DNA
ttttttaaaatgcatgagttcg

SEQ ID NO: 59214 - DNA, 22 bp, synthetic construct
  misc_feature 1..22: note = chemically synthesized
  source 1..22: mol_type = other DNA
tttaaaatgcatgagttcgtta

SEQ ID NO: 59215 - DNA, 22 bp, synthetic construct
  misc_feature 1..22: note = chemically synthesized
  source 1..22: mol_type = other DNA
ttaaaatgcatgagttcgttac

SEQ ID NO: 59216 - DNA, 22 bp, synthetic construct
  misc_feature 1..22: note = chemically synthesized
  source 1..22: mol_type = other DNA
taaaatgcatgagttcgttacc

SEQ ID NO: 59217 - DNA, 22 bp, synthetic construct
  misc_feature 1..22: note = chemically synthesized
  source 1..22: mol_type = other DNA
aaaatgcatgagttcgttacct

SEQ ID NO: 59218 - DNA, 22 bp, synthetic construct
  misc_feature 1..22: note = chemically synthesized
  source 1..22: mol_type = other DNA
aaatgcatgagttcgttacctg

SEQ ID NO: 59219 - DNA, 22 bp, synthetic construct
  misc_feature 1..22: note = chemically synthesized
  source 1..22: mol_type = other DNA
gttacctgattcattccctggt

SEQ ID NO: 59220 - DNA, 22 bp, synthetic construct
  misc_feature 1..22: note = chemically synthesized
  source 1..22: mol_type = other DNA
cctgattcattccctggttcct

SEQ ID NO: 59221 - DNA, 22 bp, synthetic construct
  misc_feature 1..22: note = chemically synthesized
  source 1..22: mol_type = other DNA
attcattccctggttcctttca

SEQ ID NO: 59222 - DNA, 22 bp, synthetic construct
  misc_feature 1..22: note = chemically synthesized
  source 1..22: mol_type = other DNA
attccctggttcctttcacagt

SEQ ID NO: 59223 - DNA, 22 bp, synthetic construct
  misc_feature 1..22: note = chemically synthesized
  source 1..22: mol_type = other DNA
cctggttcctttcacagtcctc

SEQ ID NO: 59224 - DNA, 22 bp, synthetic construct
  misc_feature 1..22: note = chemically synthesized
  source 1..22: mol_type = other DNA
gttcctttcacagtcctccgtg

SEQ ID NO: 59225 - DNA, 22 bp, synthetic construct
  misc_feature 1..22: note = chemically synthesized
  source 1..22: mol_type = other DNA
ctttcacagtcctccgtgaccc

SEQ ID NO: 59226 - DNA, 22 bp, synthetic construct
  misc_feature 1..22: note = chemically synthesized
  source 1..22: mol_type = other DNA
tcacagtcctccgtgacccaag

SEQ ID NO: 59227 - DNA, 22 bp, synthetic construct
  misc_feature 1..22: note = chemically synthesized
  source 1..22: mol_type = other DNA
cacagtcctccgtgacccaagt

SEQ ID NO: 59228 - DNA, 22 bp, synthetic construct
  misc_feature 1..22: note = chemically synthesized
  source 1..22: mol_type = other DNA
acagtcctccgtgacccaagtg

SEQ ID NO: 59229 - DNA, 22 bp, synthetic construct
  misc_feature 1..22: note = chemically synthesized
  source 1..22: mol_type = other DNA
cgtgacccaagtgttagggttt

SEQ ID NO: 59230 - DNA, 22 bp, synthetic construct
  misc_feature 1..22: note = chemically synthesized
  source 1..22: mol_type = other DNA
gggttttggtctctctactatt

SEQ ID NO: 59231 - DNA, 22 bp, synthetic construct
  misc_feature 1..22: note = chemically synthesized
  source 1..22: mol_type = other DNA
tggtctctctactatttgtagg

SEQ ID NO: 59232 - DNA, 22 bp, synthetic construct
  misc_feature 1..22: note = chemically synthesized
  source 1..22: mol_type = other DNA
ggtctctctactatttgtaggc

SEQ ID NO: 59233 - DNA, 22 bp, synthetic construct
  misc_feature 1..22: note = chemically synthesized
  source 1..22: mol_type = other DNA
gtctctctactatttgtaggct

SEQ ID NO: 59234 - DNA, 22 bp, synthetic construct
  misc_feature 1..22: note = chemically synthesized
  source 1..22: mol_type = other DNA
tctactatttgtaggctgatat

SEQ ID NO: 59235 - DNA, 22 bp, synthetic construct
  misc_feature 1..22: note = chemically synthesized
  source 1..22: mol_type = other DNA
tactatttgtaggctgatatat

SEQ ID NO: 59236 - DNA, 22 bp, synthetic construct
  misc_feature 1..22: note = chemically synthesized
  source 1..22: mol_type = other DNA
ctatttgtaggctgatatatag

SEQ ID NO: 59237 - DNA, 22 bp, synthetic construct
  misc_feature 1..22: note = chemically synthesized
  source 1..22: mol_type = other DNA
tttgtaggctgatatatagtat

SEQ ID NO: 59238 - DNA, 22 bp, synthetic construct
  misc_feature 1..22: note = chemically synthesized
  source 1..22: mol_type = other DNA
gtaggctgatatatagtataca

SEQ ID NO: 59239 - DNA, 22 bp, synthetic construct
  misc_feature 1..22: note = chemically synthesized
  source 1..22: mol_type = other DNA
taggctgatatatagtatacac

SEQ ID NO: 59240 - DNA, 22 bp, synthetic construct
  misc_feature 1..22: note = chemically synthesized
  source 1..22: mol_type = other DNA
atatatagtatacacacacaca

SEQ ID NO: 59241 - DNA, 22 bp, synthetic construct
  misc_feature 1..22: note = chemically synthesized
  source 1..22: mol_type = other DNA
gagctttcttttgtatatctac

SEQ ID NO: 59242 - DNA, 22 bp, synthetic construct
  misc_feature 1..22: note = chemically synthesized
  source 1..22: mol_type = other DNA
agctttcttttgtatatctaca

SEQ ID NO: 59243 - DNA, 22 bp, synthetic construct
  misc_feature 1..22: note = chemically synthesized
  source 1..22: mol_type = other DNA
tcttttgtatatctacacacat

SEQ ID NO: 59244 - DNA, 22 bp, synthetic construct
  misc_feature 1..22: note = chemically synthesized
  source 1..22: mol_type = other DNA
cttttgtatatctacacacata

SEQ ID NO: 59245 - DNA, 22 bp, synthetic construct
  misc_feature 1..22: note = chemically synthesized
  source 1..22: mol_type = other DNA
ttttgtatatctacacacatat

SEQ ID NO: 59246 - DNA, 22 bp, synthetic construct
  misc_feature 1..22: note = chemically synthesized
  source 1..22: mol_type = other DNA
ttgtatatctacacacatatgt

SEQ ID NO: 59247 - DNA, 22 bp, synthetic construct
  misc_feature 1..22: note = chemically synthesized
  source 1..22: mol_type = other DNA
tgtatatctacacacatatgta

SEQ ID NO: 59248 - DNA, 22 bp, synthetic construct
  misc_feature 1..22: note = chemically synthesized
  source 1..22: mol_type = other DNA
gtatatctacacacatatgtat

SEQ ID NO: 59249 - DNA, 22 bp, synthetic construct
  misc_feature 1..22: note = chemically synthesized
  source 1..22: mol_type = other DNA
tatatctacacacatatgtata

SEQ ID NO: 59250 - DNA, 22 bp, synthetic construct
  misc_feature 1..22: note = chemically synthesized
  source 1..22: mol_type = other DNA
cacacatatgtataagaaagct

SEQ ID NO: 59251 - DNA, 22 bp, synthetic construct
  misc_feature 1..22: note = chemically synthesized
  source 1..22: mol_type = other DNA
aagatatagaagccctttttca

SEQ ID NO: 59252 - DNA, 22 bp, synthetic construct
  misc_feature 1..22: note = chemically synthesized
  source 1..22: mol_type = other DNA
tttcaaaaataactgaaagttt

SEQ ID NO: 59253 - DNA, 22 bp, synthetic construct
  misc_feature 1..22: note = chemically synthesized
  source 1..22: mol_type = other DNA
ttcaaaaataactgaaagtttc

SEQ ID NO: 59254 - DNA, 22 bp, synthetic construct
  misc_feature 1..22: note = chemically synthesized
  source 1..22: mol_type = other DNA
tcaaaaataactgaaagtttca

SEQ ID NO: 59255 - DNA, 22 bp, synthetic construct
  misc_feature 1..22: note = chemically synthesized
  source 1..22: mol_type = other DNA
caaaaataactgaaagtttcaa

SEQ ID NO: 59256 - DNA, 22 bp, synthetic construct
  misc_feature 1..22: note = chemically synthesized
  source 1..22: mol_type = other DNA
aaaaataactgaaagtttcaaa

SEQ ID NO: 59257 - DNA, 22 bp, synthetic construct
  misc_feature 1..22: note = chemically synthesized
  source 1..22: mol_type = other DNA
aaagtttcaaactctttaagtc

SEQ ID NO: 59258 - DNA, 22 bp, synthetic construct
  misc_feature 1..22: note = chemically synthesized
  source 1..22: mol_type = other DNA
caaactctttaagtctccagtt

SEQ ID NO: 59259 - DNA, 22 bp, synthetic construct
  misc_feature 1..22: note = chemically synthesized
  source 1..22: mol_type = other DNA
aaactctttaagtctccagtta

SEQ ID NO: 59260 - DNA, 22 bp, synthetic construct
  misc_feature 1..22: note = chemically synthesized
  source 1..22: mol_type = other DNA
tttaagtctccagttaccattt

SEQ ID NO: 59261 - DNA, 22 bp, synthetic construct
  misc_feature 1..22: note = chemically synthesized
  source 1..22: mol_type = other DNA
taagtctccagttaccattttg

SEQ ID NO: 59262 - DNA, 22 bp, synthetic construct
  misc_feature 1..22: note = chemically synthesized
  source 1..22: mol_type = other DNA
aagtctccagttaccattttgc

SEQ ID NO: 59263 - DNA, 22 bp, synthetic construct
  misc_feature 1..22: note = chemically synthesized
  source 1..22: mol_type = other DNA
agtctccagttaccattttgct

SEQ ID NO: 59264 - DNA, 22 bp, synthetic construct
  misc_feature 1..22: note = chemically synthesized
  source 1..22: mol_type = other DNA
cagttaccattttgctggtatt

SEQ ID NO: 59265 - DNA, 22 bp, synthetic construct
  misc_feature 1..22: note = chemically synthesized
  source 1..22: mol_type = other DNA
ccattttgctggtattcttatt

SEQ ID NO: 59266 - DNA, 22 bp, synthetic construct
  misc_feature 1..22: note = chemically synthesized
  source 1..22: mol_type = other DNA
tgctggtattcttatttggaac

SEQ ID NO: 59267 - DNA, 22 bp, synthetic construct
  misc_feature 1..22: note = chemically synthesized
  source 1..22: mol_type = other DNA
gctggtattcttatttggaacc

SEQ ID NO: 59268 - DNA, 22 bp, synthetic construct
  misc_feature 1..22: note = chemically synthesized
  source 1..22: mol_type = other DNA
ctggtattcttatttggaacca

SEQ ID NO: 59269 - DNA, 22 bp, synthetic construct
  misc_feature 1..22: note = chemically synthesized
  source 1..22: mol_type = other DNA
gtattcttatttggaaccatac

SEQ ID NO: 59270 - DNA, 22 bp, synthetic construct
  misc_feature 1..22: note = chemically synthesized
  source 1..22: mol_type = other DNA
ttatttggaaccatacattcat

SEQ ID NO: 59271 - DNA, 22 bp, synthetic construct
  misc_feature 1..22: note = chemically synthesized
  source 1..22: mol_type = other DNA
atttggaaccatacattcatca

SEQ ID NO: 59272 - DNA, 22 bp, synthetic construct
  misc_feature 1..22: note = chemically synthesized
  source 1..22: mol_type = other DNA
tttggaaccatacattcatcat

SEQ ID NO: 59273 - DNA, 22 bp, synthetic construct
  misc_feature 1..22: note = chemically synthesized
  source 1..22: mol_type = other DNA
ggaaccatacattcatcatatt

SEQ ID NO: 59274 - DNA, 22 bp, synthetic construct
  misc_feature 1..22: note = chemically synthesized
  source 1..22: mol_type = other DNA
gaaccatacattcatcatattg

SEQ ID NO: 59275 - DNA, 22 bp, synthetic construct
  misc_feature 1..22: note = chemically synthesized
  source 1..22: mol_type = other DNA
atcatattgttgcacagtaaga

SEQ ID NO: 59276 - DNA, 22 bp, synthetic construct
  misc_feature 1..22: note = chemically synthesized
  source 1..22: mol_type = other DNA
ttgcacagtaagactatacatt

SEQ ID NO: 59277 - DNA, 22 bp, synthetic construct
  misc_feature 1..22: note = chemically synthesized
  source 1..22: mol_type = other DNA
cacagtaagactatacattcat

SEQ ID NO: 59278 - DNA, 22 bp, synthetic construct
  misc_feature 1..22: note = chemically synthesized
  source 1..22: mol_type = other DNA
tacattcattattttgcttaaa

SEQ ID NO: 59279 - DNA, 22 bp, synthetic construct
  misc_feature 1..22: note = chemically synthesized
  source 1..22: mol_type = other DNA
attattttgcttaaacgtatga

SEQ ID NO: 59280 - DNA, 22 bp, synthetic construct
  misc_feature 1..22: note = chemically synthesized
  source 1..22: mol_type = other DNA
ttttgcttaaacgtatgagtta

SEQ ID NO: 59281 - DNA, 22 bp, synthetic construct
  misc_feature 1..22: note = chemically synthesized
  source 1..22: mol_type = other DNA
tgcttaaacgtatgagttaaaa

SEQ ID NO: 59282 - DNA, 22 bp, synthetic construct
  misc_feature 1..22: note = chemically synthesized
  source 1..22: mol_type = other DNA
gcttaaacgtatgagttaaaac

SEQ ID NO: 59283 - DNA, 22 bp, synthetic construct
  misc_feature 1..22: note = chemically synthesized
  source 1..22: mol_type = other DNA
cttaaacgtatgagttaaaaca

SEQ ID NO: 59284 - DNA, 22 bp, synthetic construct
  misc_feature 1..22: note = chemically synthesized
  source 1..22: mol_type = other DNA
aaacgtatgagttaaaacactt

SEQ ID NO: 59285 - DNA, 22 bp, synthetic construct
  misc_feature 1..22: note = chemically synthesized
  source 1..22: mol_type = other DNA
aacgtatgagttaaaacacttg

SEQ ID NO: 59286 - DNA, 22 bp, synthetic construct
  misc_feature 1..22: note = chemically synthesized
  source 1..22: mol_type = other DNA
aaacacttggccaggcatggtg

SEQ ID NO: 59287 - DNA, 22 bp, synthetic construct
  misc_feature 1..22: note = chemically synthesized
  source 1..22: mol_type = other DNA
ggccaggcatggtggttcacac

SEQ ID NO: 59288 - DNA, 22 bp, synthetic construct
  misc_feature 1..22: note = chemically synthesized
  source 1..22: mol_type = other DNA
gccaggcatggtggttcacacc

SEQ ID NO: 59289 - DNA, 22 bp, synthetic construct
  misc_feature 1..22: note = chemically synthesized
  source 1..22: mol_type = other DNA
acacctgtaatcccagagcttt

SEQ ID NO: 59290 - DNA, 22 bp, synthetic construct
  misc_feature 1..22: note = chemically synthesized
  source 1..22: mol_type = other DNA
taatcccagagctttgggaagc

SEQ ID NO: 59291 - DNA, 22 bp, synthetic construct
  misc_feature 1..22: note = chemically synthesized
  source 1..22: mol_type = other DNA
tgggaagccaagactggcagat

SEQ ID NO: 59292 - DNA, 22 bp, synthetic construct
  misc_feature 1..22: note = chemically synthesized
  source 1..22: mol_type = other DNA
gggaagccaagactggcagatc

SEQ ID NO: 59293 - DNA, 22 bp, synthetic construct
  misc_feature 1..22: note = chemically synthesized
  source 1..22: mol_type = other DNA
ggaagccaagactggcagatct

SEQ ID NO: 59294 - DNA, 22 bp, synthetic construct
  misc_feature 1..22: note = chemically synthesized
  source 1..22: mol_type = other DNA
gcagatctcttgagctcaggaa

SEQ ID NO: 59295 - DNA, 22 bp, synthetic construct
  misc_feature 1..22: note = chemically synthesized
  source 1..22: mol_type = other DNA
ttgagctcaggaattcaagacc

SEQ ID NO: 59296 - DNA, 22 bp, synthetic construct
  misc_feature 1..22: note = chemically synthesized
  source 1..22: mol_type = other DNA
gagctcaggaattcaagaccag

SEQ ID NO: 59297 - DNA, 22 bp, synthetic construct
  misc_feature 1..22: note = chemically synthesized
  source 1..22: mol_type = other DNA
agctcaggaattcaagaccagc

SEQ ID NO: 59298 - DNA, 22 bp, synthetic construct
  misc_feature 1..22: note = chemically synthesized
  source 1..22: mol_type = other DNA
aggaattcaagaccagcctggg

SEQ ID NO: 59299 - DNA, 22 bp, synthetic construct
  misc_feature 1..22: note = chemically synthesized
  source 1..22: mol_type = other DNA
aagaccagcctgggcaacatgg

SEQ ID NO: 59300 - DNA, 22 bp, synthetic construct
  misc_feature 1..22: note = chemically synthesized
  source 1..22: mol_type = other DNA
ggcaacatggaaaaaccccatc

SEQ ID NO: 59301 - DNA, 22 bp, synthetic construct
  misc_feature 1..22: note = chemically synthesized
  source 1..22: mol_type = other DNA
tacaaaagatagaaaaattagc

SEQ ID NO: 59302 - DNA, 22 bp, synthetic construct
  misc_feature 1..22: note = chemically synthesized
  source 1..22: mol_type = other DNA
caaaagatagaaaaattagcca

SEQ ID NO: 59303 - DNA, 22 bp, synthetic construct
  misc_feature 1..22: note = chemically synthesized
  source 1..22: mol_type = other DNA
gccaggcatggtggcgtgtgcc

SEQ ID NO: 59304 - DNA, 22 bp, synthetic construct
  misc_feature 1..22: note = chemically synthesized
  source 1..22: mol_type = other DNA
tggtcccagctactcaggaggc

SEQ ID NO: 59305 - DNA, 22 bp, synthetic construct
  misc_feature 1..22: note = chemically synthesized
  source 1..22: mol_type = other DNA
ctcaggaggctgaggtgggagg

SEQ ID NO: 59306 - DNA, 22 bp, synthetic construct
  misc_feature 1..22: note = chemically synthesized
  source 1..22: mol_type = other DNA
aggaggctgaggtgggaggatc

SEQ ID NO: 59307 - DNA, 22 bp, synthetic construct
  misc_feature 1..22: note = chemically synthesized
  source 1..22: mol_type = other DNA
aggtgggaggatcacattagcc

SEQ ID NO: 59308 - DNA, 22 bp, synthetic construct
  misc_feature 1..22: note = chemically synthesized
  source 1..22: mol_type = other DNA
gcccaggaggttgaggctgcag

SEQ ID NO: 59309 - DNA, 22 bp, synthetic construct
  misc_feature 1..22: note = chemically synthesized
  source 1..22: mol_type = other DNA
aggctgcagtgagccgtgatta

SEQ ID NO: 59310 - DNA, 22 bp, synthetic construct
  misc_feature 1..22: note = chemically synthesized
  source 1..22: mol_type = other DNA
cagtgagccgtgattatgccac

SEQ ID NO: 59311 - DNA, 22 bp, synthetic construct
  misc_feature 1..22: note = chemically synthesized
  source 1..22: mol_type = other DNA
tgccactgcactccagcctggg

SEQ ID NO: 59312 - DNA, 22 bp, synthetic construct
  misc_feature 1..22: note = chemically synthesized
  source 1..22: mol_type = other DNA
cactccagcctgggagacagag

SEQ ID NO: 59313 - DNA, 22 bp, synthetic construct
  misc_feature 1..22: note = chemically synthesized
  source 1..22: mol_type = other DNA
cagcctgggagacagagtgaga

SEQ ID NO: 59314 - DNA, 22 bp, synthetic construct
  misc_feature 1..22: note = chemically synthesized
  source 1..22: mol_type = other DNA
ggagacagagtgagaccctgtt

SEQ ID NO: 59315 - DNA, 22 bp, synthetic construct
  misc_feature 1..22: note = chemically synthesized
  source 1..22: mol_type = other DNA
tttcaaaaaaaagagagagaaa

SEQ ID NO: 59316 - DNA, 22 bp, synthetic construct
  misc_feature 1..22: note = chemically synthesized
  source 1..22: mol_type = other DNA
caaaaaaaagagagagaaaatt

SEQ ID NO: 59317 - DNA, 22 bp, synthetic construct
  misc_feature 1..22: note = chemically synthesized
  source 1..22: mol_type = other DNA
aaaaaaaagagagagaaaattt

SEQ ID NO: 59318 - DNA, 22 bp, synthetic construct
  misc_feature 1..22: note = chemically synthesized
  source 1..22: mol_type = other DNA
aaaaaagaaaacaacaccaagg

SEQ ID NO: 59319 - DNA, 22 bp, synthetic construct
  misc_feature 1..22: note = chemically synthesized
  source 1..22: mol_type = other DNA
aaaaagaaaacaacaccaaggg

SEQ ID NO: 59320 - DNA, 22 bp, synthetic construct
  misc_feature 1..22: note = chemically synthesized
  source 1..22: mol_type = other DNA
taactttaaggtcattaaatga

SEQ ID NO: 59321 - DNA, 22 bp, synthetic construct
  misc_feature 1..22: note = chemically synthesized
  source 1..22: mol_type = other DNA
taaggtcattaaatgaattaat

SEQ ID NO: 59322 - DNA, 22 bp, synthetic construct
  misc_feature 1..22: note = chemically synthesized
  source 1..22: mol_type = other DNA
aaggtcattaaatgaattaatc

SEQ ID NO: 59323 - DNA, 22 bp, synthetic construct
  misc_feature 1..22: note = chemically synthesized
  source 1..22: mol_type = other DNA
aggtcattaaatgaattaatca

SEQ ID NO: 59324 - DNA, 22 bp, synthetic construct
  misc_feature 1..22: note = chemically synthesized
  source 1..22: mol_type = other DNA
aatgaattaatcactgcattca

SEQ ID NO: 59325 - DNA, 22 bp, synthetic construct
  misc_feature 1..22: note = chemically synthesized
  source 1..22: mol_type = other DNA
atcactgcattcaaaaacgatt

SEQ ID NO: 59326 - DNA, 22 bp, synthetic construct
  misc_feature 1..22: note = chemically synthesized
  source 1..22: mol_type = other DNA
cattcaaaaacgattactttct

SEQ ID NO: 59327 - DNA, 22 bp, synthetic construct
  misc_feature 1..22: note = chemically synthesized
  source 1..22: mol_type = other DNA
aaaaacgattactttctggccc

SEQ ID NO: 59328 - DNA, 22 bp, synthetic construct
  misc_feature 1..22: note = chemically synthesized
  source 1..22: mol_type = other DNA
ctttctggccctaagagacatg

SEQ ID NO: 59329 - DNA, 22 bp, synthetic construct
  misc_feature 1..22: note = chemically synthesized
  source 1..22: mol_type = other DNA
tctggccctaagagacatgagg

SEQ ID NO: 59330 - DNA, 22 bp, synthetic construct
  misc_feature 1..22: note = chemically synthesized
  source 1..22: mol_type = other DNA
ctggccctaagagacatgaggc

SEQ ID NO: 59331 - DNA, 22 bp, synthetic construct
  misc_feature 1..22: note = chemically synthesized
  source 1..22: mol_type = other DNA
tggccctaagagacatgaggcc

SEQ ID NO: 59332 - DNA, 22 bp, synthetic construct
  misc_feature 1..22: note = chemically synthesized
  source 1..22: mol_type = other DNA
gccctaagagacatgaggccaa

SEQ ID NO: 59333 - DNA, 22 bp, synthetic construct
  misc_feature 1..22: note = chemically synthesized
  source 1..22: mol_type = other DNA
agagacatgaggccaataccag

SEQ ID NO: 59334 - DNA, 22 bp, synthetic construct
  misc_feature 1..22: note = chemically synthesized
  source 1..22: mol_type = other DNA
atctcccaaaccagaggcagac

SEQ ID NO: 59335 - DNA, 22 bp, synthetic construct
  misc_feature 1..22: note = chemically synthesized
  source 1..22: mol_type = other DNA
ccaaaccagaggcagaccctag

SEQ ID NO: 59336 - DNA, 22 bp, synthetic construct
  misc_feature 1..22: note = chemically synthesized
  source 1..22: mol_type = other DNA
gactctaatacagttaaggaaa

SEQ ID NO: 59337 - DNA, 22 bp, synthetic construct
  misc_feature 1..22: note = chemically synthesized
  source 1..22: mol_type = other DNA
taatacagttaaggaaagacca

SEQ ID NO: 59338 - DNA, 22 bp, synthetic construct
  misc_feature 1..22: note = chemically synthesized
  source 1..22: mol_type = other DNA
atacagttaaggaaagaccagc

SEQ ID NO: 59339 - DNA, 22 bp, synthetic construct
  misc_feature 1..22: note = chemically synthesized
  source 1..22: mol_type = other DNA
aggaaagaccagcaagatgata

SEQ ID NO: 59340 - DNA, 22 bp, synthetic construct
  misc_feature 1..22: note = chemically synthesized
  source 1..22: mol_type = other DNA
ctatattttatttgttgttttt

SEQ ID NO: 59341 - DNA, 22 bp, synthetic construct
  misc_feature 1..22: note = chemically synthesized
  source 1..22: mol_type = other DNA
tattttatttgttgtttttctt

SEQ ID NO: 59342 - DNA, 22 bp, synthetic construct
  misc_feature 1..22: note = chemically synthesized
  source 1..22: mol_type = other DNA
tatttgttgtttttcttttgtt

SEQ ID NO: 59343 - DNA, 22 bp, synthetic construct
  misc_feature 1..22: note = chemically synthesized
  source 1..22: mol_type = other DNA
atttgttgtttttcttttgttt

SEQ ID NO: 59344 - DNA, 22 bp, synthetic construct
  misc_feature 1..22: note = chemically synthesized
  source 1..22: mol_type = other DNA
tttgttgtttttcttttgtttt

SEQ ID NO: 59345 - DNA, 22 bp, synthetic construct
  misc_feature 1..22: note = chemically synthesized
  source 1..22: mol_type = other DNA
gttgtttttcttttgttttgtt

SEQ ID NO: 59346 - DNA, 22 bp, synthetic construct
  misc_feature 1..22: note = chemically synthesized
  source 1..22: mol_type = other DNA
ttgtttttcttttgttttgttt

SEQ ID NO: 59347 - DNA, 22 bp, synthetic construct
  misc_feature 1..22: note = chemically synthesized
  source 1..22: mol_type = other DNA
tttttcttttgttttgttttgt

SEQ ID NO: 59348 - DNA, 22 bp, synthetic construct
  misc_feature 1..22: note = chemically synthesized
  source 1..22: mol_type = other DNA
ttcttttgttttgttttgtttt

SEQ ID NO: 59349 - DNA, 22 bp, synthetic construct
  misc_feature 1..22: note = chemically synthesized
  source 1..22: mol_type = other DNA
tcttttgttttgttttgttttg

SEQ ID NO: 59350 - DNA, 22 bp, synthetic construct
  misc_feature 1..22: note = chemically synthesized
  source 1..22: mol_type = other DNA
cttttgttttgttttgttttgt

SEQ ID NO: 59351 - DNA, 22 bp, synthetic construct
  misc_feature 1..22: note = chemically synthesized
  source 1..22: mol_type = other DNA
ttttgttttgttttgttttgtt

SEQ ID NO: 59352 - DNA, 22 bp, synthetic construct
  misc_feature 1..22: note = chemically synthesized
  source 1..22: mol_type = other DNA
ttgttttgttttgttttgtttt

SEQ ID NO: 59353 - DNA, 22 bp, synthetic construct
  misc_feature 1..22: note = chemically synthesized
  source 1..22: mol_type = other DNA
tgttttgttttgttttgttttg

SEQ ID NO: 59354 - DNA, 22 bp, synthetic construct
  misc_feature 1..22: note = chemically synthesized
  source 1..22: mol_type = other DNA
gttttgttttgttttgttttgt

SEQ ID NO: 59355 - DNA, 22 bp, synthetic construct
  misc_feature 1..22: note = chemically synthesized
  source 1..22: mol_type = other DNA
ttttgttttgttttgttttgtt

SEQ ID NO: 59356 - DNA, 22 bp, synthetic construct
  misc_feature 1..22: note = chemically synthesized
  source 1..22: mol_type = other DNA
tgttttgttttgttttgttttg

SEQ ID NO: 59357 - DNA, 22 bp, synthetic construct
  misc_feature 1..22: note = chemically synthesized
  source 1..22: mol_type = other DNA
gttttgttttgttttgttttgt

SEQ ID NO: 59358 - DNA, 22 bp, synthetic construct
  misc_feature 1..22: note = chemically synthesized
  source 1..22: mol_type = other DNA
ttttgttttgttttgttttgtt

SEQ ID NO: 59359 - DNA, 22 bp, synthetic construct
  misc_feature 1..22: note = chemically synthesized
  source 1..22: mol_type = other DNA
tgttttgttttgttttgtttta

SEQ ID NO: 59360 - DNA, 22 bp, synthetic construct
  misc_feature 1..22: note = chemically synthesized
  source 1..22: mol_type = other DNA
gttttgttttgttttgttttag

SEQ ID NO: 59361 - DNA, 22 bp, synthetic construct
  misc_feature 1..22: note = chemically synthesized
  source 1..22: mol_type = other DNA
ttttgttttgttttgttttaga

SEQ ID NO: 59362 - DNA, 22 bp, synthetic construct
  misc_feature 1..22: note = chemically synthesized
  source 1..22: mol_type = other DNA
tgttttgttttgttttagagac

SEQ ID NO: 59363 - DNA, 22 bp, synthetic construct
  misc_feature 1..22: note = chemically synthesized
  source 1..22: mol_type = other DNA
gttttgttttgttttagagact

SEQ ID NO: 59364 - DNA, 22 bp, synthetic construct
  misc_feature 1..22: note = chemically synthesized
  source 1..22: mol_type = other DNA
ttttgttttgttttagagactg

SEQ ID NO: 59365 - DNA, 22 bp, synthetic construct
  misc_feature 1..22: note = chemically synthesized
  source 1..22: mol_type = other DNA
tgttttgttttagagactgggg

SEQ ID NO: 59366 - DNA, 22 bp, synthetic construct
  misc_feature 1..22: note = chemically synthesized
  source 1..22: mol_type = other DNA
gttttgttttagagactggggt

SEQ ID NO: 59367 - DNA, 22 bp, synthetic construct
  misc_feature 1..22: note = chemically synthesized
  source 1..22: mol_type = other DNA
ttttgttttagagactggggtc

SEQ ID NO: 59368 - DNA, 22 bp, synthetic construct
  misc_feature 1..22: note = chemically synthesized
  source 1..22: mol_type = other DNA
tgttttagagactggggtcttg

SEQ ID NO: 59369 - DNA, 22 bp, synthetic construct
  misc_feature 1..22: note = chemically synthesized
  source 1..22: mol_type = other DNA
gttttagagactggggtcttgc

SEQ ID NO: 59370 - DNA, 22 bp, synthetic construct
  misc_feature 1..22: note = chemically synthesized
  source 1..22: mol_type = other DNA
ttttagagactggggtcttgct

SEQ ID NO: 59371 - DNA, 22 bp, synthetic construct
  misc_feature 1..22: note = chemically synthesized
  source 1..22: mol_type = other DNA
tagagactggggtcttgctcga

SEQ ID NO: 59372 - DNA, 22 bp, synthetic construct
  misc_feature 1..22: note = chemically synthesized
  source 1..22: mol_type = other DNA
agagactggggtcttgctcgat

SEQ ID NO: 59373 - DNA, 22 bp, synthetic construct
  misc_feature 1..22: note = chemically synthesized
  source 1..22: mol_type = other DNA
gagactggggtcttgctcgatt

SEQ ID NO: 59374 - DNA, 22 bp, synthetic construct
  misc_feature 1..22: note = chemically synthesized
  source 1..22: mol_type = other DNA
gggtcttgctcgattgcccagg

SEQ ID NO: 59375 - DNA, 22 bp, synthetic construct
  misc_feature 1..22: note = chemically synthesized
  source 1..22: mol_type = other DNA
gctcgattgcccaggctgtagt

SEQ ID NO: 59376 - DNA, 22 bp, synthetic construct
  misc_feature 1..22: note = chemically synthesized
  source 1..22: mol_type = other DNA
ctcgattgcccaggctgtagtg

SEQ ID NO: 59377 - DNA, 22 bp, synthetic construct
  misc_feature 1..22: note = chemically synthesized
  source 1..22: mol_type = other DNA
gattgcccaggctgtagtgcag

SEQ ID NO: 59378 - DNA, 22 bp, synthetic construct
  misc_feature 1..22: note = chemically synthesized
  source 1..22: mol_type = other DNA
cccaggctgtagtgcagcggtg

SEQ ID NO: 59379 - DNA, 22 bp, synthetic construct
  misc_feature 1..22: note = chemically synthesized
  source 1..22: mol_type = other DNA
tagtgcagcggtgggacaatag

SEQ ID NO: 59380 - DNA, 22 bp, synthetic construct
  misc_feature 1..22: note = chemically synthesized
  source 1..22: mol_type = other DNA
actgcagactccaactcctggg

SEQ ID NO: 59381 - DNA, 22 bp, synthetic construct
  misc_feature 1..22: note = chemically synthesized
  source 1..22: mol_type = other DNA
cagactccaactcctgggctca

SEQ ID NO: 59382 - DNA, 22 bp, synthetic construct
  misc_feature 1..22: note = chemically synthesized
  source 1..22: mol_type = other DNA
caactcctgggctcaagcaatc

SEQ ID NO: 59383 - DNA, 22 bp, synthetic construct
  misc_feature 1..22: note = chemically synthesized
  source 1..22: mol_type = other DNA
ctgggctcaagcaatcctcctg

SEQ ID NO: 59384 - DNA, 22 bp, synthetic construct
  misc_feature 1..22: note = chemically synthesized
  source 1..22: mol_type = other DNA
ggctcaagcaatcctcctgcct

SEQ ID NO: 59385 - DNA, 22 bp, synthetic construct
  misc_feature 1..22: note = chemically synthesized
  source 1..22: mol_type = other DNA
aagcaatcctcctgcctcagcc

SEQ ID NO: 59386 - DNA, 22 bp, synthetic construct
  misc_feature 1..22: note = chemically synthesized
  source 1..22: mol_type = other DNA
ctgcctcagcctcctgaatagc

SEQ ID NO: 59387 - DNA, 22 bp, synthetic construct
  misc_feature 1..22: note = chemically synthesized
  source 1..22: mol_type = other DNA
cctcagcctcctgaatagctgg

SEQ ID NO: 59388 - DNA, 22 bp, synthetic construct
  misc_feature 1..22: note = chemically synthesized
  source 1..22: mol_type = other DNA
agcctcctgaatagctgggact

SEQ ID NO: 59389 - DNA, 22 bp, synthetic construct
  misc_feature 1..22: note = chemically synthesized
  source 1..22: mol_type = other DNA
ctgaatagctgggactacaagg

SEQ ID NO: 59390 - DNA, 22 bp, synthetic construct
  misc_feature 1..22: note = chemically synthesized
  source 1..22: mol_type = other DNA
aatagctgggactacaagggta

SEQ ID NO: 59391 - DNA, 22 bp, synthetic construct
  misc_feature 1..22: note = chemically synthesized
  source 1..22: mol_type = other DNA
ggactacaagggtacaccatca

SEQ ID NO: 59392 - DNA, 22 bp, synthetic construct
  misc_feature 1..22: note = chemically synthesized
  source 1..22: mol_type = other DNA
caagggtacaccatcacacaca

SEQ ID NO: 59393 - DNA, 22 bp, synthetic construct
  misc_feature 1..22: note = chemically synthesized
  source 1..22: mol_type = other DNA
tttaaatttttgtgtagaaacg

SEQ ID NO: 59394 - DNA, 22 bp, synthetic construct
  misc_feature 1..22: note = chemically synthesized
  source 1..22: mol_type = other DNA
ttaaatttttgtgtagaaacga

SEQ ID NO: 59395 - DNA, 22 bp, synthetic construct
  misc_feature 1..22: note = chemically synthesized
  source 1..22: mol_type = other DNA
taaatttttgtgtagaaacgag

SEQ ID NO: 59396 - DNA, 22 bp, synthetic construct
  misc_feature 1..22: note = chemically synthesized
  source 1..22: mol_type = other DNA
aaatttttgtgtagaaacgagg

SEQ ID NO: 59397 - DNA, 22 bp, synthetic construct
  misc_feature 1..22: note = chemically synthesized
  source 1..22: mol_type = other DNA
aatttttgtgtagaaacgaggg

SEQ ID NO: 59398 - DNA, 22 bp, synthetic construct
  misc_feature 1..22: note = chemically synthesized
  source 1..22: mol_type = other DNA
ttgtgtagaaacgagggtcttg

SEQ ID NO: 59399 - DNA, 22 bp, synthetic construct
  misc_feature 1..22: note = chemically synthesized
  source 1..22: mol_type = other DNA
tgtgtagaaacgagggtcttgc

SEQ ID NO: 59400 - DNA, 22 bp, synthetic construct
  misc_feature 1..22: note = chemically synthesized
  source 1..22: mol_type = other DNA
gtgtagaaacgagggtcttgct

SEQ ID NO: 59401 - DNA, 22 bp, synthetic construct
  misc_feature 1..22: note = chemically synthesized
  source 1..22: mol_type = other DNA
tgtagaaacgagggtcttgctt

SEQ ID NO: 59402 - DNA, 22 bp, synthetic construct
  misc_feature 1..22: note = chemically synthesized
  source 1..22: mol_type = other DNA
gctttgttgcccaggctggtct

SEQ ID NO: 59403 - DNA, 22 bp, synthetic construct
  misc_feature 1..22: note = chemically synthesized
  source 1..22: mol_type = other DNA
ctttgttgcccaggctggtctc

SEQ ID NO: 59404 - DNA, 22 bp, synthetic construct
  misc_feature 1..22: note = chemically synthesized
  source 1..22: mol_type = other DNA
tgttgcccaggctggtctccaa

SEQ ID NO: 59405 - DNA, 22 bp, synthetic construct
  misc_feature 1..22: note = chemically synthesized
  source 1..22: mol_type = other DNA
gttgcccaggctggtctccaac

SEQ ID NO: 59406 - DNA, 22 bp, synthetic construct
  misc_feature 1..22: note = chemically synthesized
  source 1..22: mol_type = other DNA
ttgcccaggctggtctccaact

SEQ ID NO: 59407 - DNA, 22 bp, synthetic construct
  misc_feature 1..22: note = chemically synthesized
  source 1..22: mol_type = other DNA
cccaggctggtctccaactcct

SEQ ID NO: 59408 - DNA, 22 bp, synthetic construct
  misc_feature 1..22: note = chemically synthesized
  source 1..22: mol_type = other DNA
gtctccaactcctggcttcaag

SEQ ID NO: 59409 - DNA, 22 bp, synthetic construct
  misc_feature 1..22: note = chemically synthesized
  source 1..22: mol_type = other DNA
caactcctggcttcaagggatc

SEQ ID NO: 59410 - DNA, 22 bp, synthetic construct
  misc_feature 1..22: note = chemically synthesized
  source 1..22: mol_type = other DNA
ctggcttcaagggatcctccca

SEQ ID NO: 59411 - DNA, 22 bp, synthetic construct
  misc_feature 1..22: note = chemically synthesized
  source 1..22: mol_type = other DNA
gcttcaagggatcctcccacct

SEQ ID NO: 59412 - DNA, 22 bp, synthetic construct
  misc_feature 1..22: note = chemically synthesized
  source 1..22: mol_type = other DNA
caagggatcctcccacctcagc

SEQ ID NO: 59413 - DNA, 22 bp, synthetic construct
  misc_feature 1..22: note = chemically synthesized
  source 1..22: mol_type = other DNA
aagggatcctcccacctcagcc

SEQ ID NO: 59414 - DNA, 22 bp, synthetic construct
  misc_feature 1..22: note = chemically synthesized
  source 1..22: mol_type = other DNA
ccacctcagcctcccaaattgc

SEQ ID NO: 59415 - DNA, 22 bp, synthetic construct
  misc_feature 1..22: note = chemically synthesized
  source 1..22: mol_type = other DNA
agcctcccaaattgctgggatt

SEQ ID NO: 59416 - DNA, 22 bp, synthetic construct
  misc_feature 1..22: note = chemically synthesized
  source 1..22: mol_type = other DNA
ccaaattgctgggattacaggt

SEQ ID NO: 59417 - DNA, 22 bp, synthetic construct
  misc_feature 1..22: note = chemically synthesized
  source 1..22: mol_type = other DNA
ctgggattacaggtgtgagcca

SEQ ID NO: 59418 - DNA, 22 bp, synthetic construct
  misc_feature 1..22: note = chemically synthesized
  source 1..22: mol_type = other DNA
ggattacaggtgtgagccacca

SEQ ID NO: 59419 - DNA, 22 bp, synthetic construct
  misc_feature 1..22: note = chemically synthesized
  source 1..22: mol_type = other DNA
caggtgtgagccaccacaacca

SEQ ID NO: 59420 - DNA, 22 bp, synthetic construct
  misc_feature 1..22: note = chemically synthesized
  source 1..22: mol_type = other DNA
tactaattttaaaattaagaac

SEQ ID NO: 59421 - DNA, 22 bp, synthetic construct
  misc_feature 1..22: note = chemically synthesized
  source 1..22: mol_type = other DNA
actaattttaaaattaagaact

SEQ ID NO: 59422 - DNA, 22 bp, synthetic construct
  misc_feature 1..22: note = chemically synthesized
  source 1..22: mol_type = other DNA
ctaattttaaaattaagaactt

SEQ ID NO: 59423 - DNA, 22 bp, synthetic construct
  misc_feature 1..22: note = chemically synthesized
  source 1..22: mol_type = other DNA
attttaaaattaagaacttaaa

SEQ ID NO: 59424 - DNA, 22 bp, synthetic construct
  misc_feature 1..22: note = chemically synthesized
  source 1..22: mol_type = other DNA
taaaattaagaacttaaaactt

SEQ ID NO: 59425 - DNA, 22 bp, synthetic construct
  misc_feature 1..22: note = chemically synthesized
  source 1..22: mol_type = other DNA
aaaattaagaacttaaaacttg

SEQ ID NO: 59426 - DNA, 22 bp, synthetic construct
  misc_feature 1..22: note = chemically synthesized
  source 1..22: mol_type = other DNA
aaattaagaacttaaaacttga

SEQ ID NO: 59427 - DNA, 22 bp, synthetic construct
  misc_feature 1..22: note = chemically synthesized
  source 1..22: mol_type = other DNA
agaacttaaaacttgaatagct

SEQ ID NO: 59428 - DNA, 22 bp, synthetic construct
  misc_feature 1..22: note = chemically synthesized
  source 1..22: mol_type = other DNA
aaaacttgaatagctagagcac

SEQ ID NO: 59429 - DNA, 22 bp, synthetic construct
  misc_feature 1..22: note = chemically synthesized
  source 1..22: mol_type = other DNA
aaacttgaatagctagagcacc

SEQ ID NO: 59430 - DNA, 22 bp, synthetic construct
  misc_feature 1..22: note = chemically synthesized
  source 1..22: mol_type = other DNA
gaatagctagagcaccaagatt

SEQ ID NO: 59431 - DNA, 22 bp, synthetic construct
  misc_feature 1..22: note = chemically synthesized
  source 1..22: mol_type = other DNA
aatagctagagcaccaagattt

SEQ ID NO: 59432 - DNA, 22 bp, synthetic construct
  misc_feature 1..22: note = chemically synthesized
  source 1..22: mol_type = other DNA
gagcaccaagatttttctttgt

SEQ ID NO: 59433 - DNA, 22 bp, synthetic construct
  misc_feature 1..22: note = chemically synthesized
  source 1..22: mol_type = other DNA
ttctttgtccccaaataagtgc

SEQ ID NO: 59434 - DNA, 22 bp, synthetic construct
  misc_feature 1..22: note = chemically synthesized
  source 1..22: mol_type = other DNA
tctttgtccccaaataagtgca

SEQ ID NO: 59435 - DNA, 22 bp, synthetic construct
  misc_feature 1..22: note = chemically synthesized
  source 1..22: mol_type = other DNA
ctttgtccccaaataagtgcag

SEQ ID NO: 59436 - DNA, 22 bp, synthetic construct
  misc_feature 1..22: note = chemically synthesized
  source 1..22: mol_type = other DNA
tttgtccccaaataagtgcagt

SEQ ID NO: 59437 - DNA, 22 bp, synthetic construct
  misc_feature 1..22: note = chemically synthesized
  source 1..22: mol_type = other DNA
tgtccccaaataagtgcagttg

SEQ ID NO: 59438 - DNA, 22 bp, synthetic construct
  misc_feature 1..22: note = chemically synthesized
  source 1..22: mol_type = other DNA
gtccccaaataagtgcagttgc

SEQ ID NO: 59439 - DNA, 22 bp, synthetic construct
  misc_feature 1..22: note = chemically synthesized
  source 1..22: mol_type = other DNA
tccccaaataagtgcagttgca

SEQ ID NO: 59440 - DNA, 22 bp, synthetic construct
  misc_feature 1..22: note = chemically synthesized
  source 1..22: mol_type = other DNA
caggcatagaaaatctgacatc

SEQ ID NO: 59441 - DNA, 22 bp, synthetic construct
  misc_feature 1..22: note = chemically synthesized
  source 1..22: mol_type = other DNA
acatctttgcaagaatcatcgt

SEQ ID NO: 59442 - DNA, 22 bp, synthetic construct
  misc_feature 1..22: note = chemically synthesized
  source 1..22: mol_type = other DNA
tgcaagaatcatcgtggatgta

SEQ ID NO: 59443 - DNA, 22 bp, synthetic construct
  misc_feature 1..22: note = chemically synthesized
  source 1..22: mol_type = other DNA
gcaagaatcatcgtggatgtag

SEQ ID NO: 59444 - DNA, 22 bp, synthetic construct
  misc_feature 1..22: note = chemically synthesized
  source 1..22: mol_type = other DNA
caagaatcatcgtggatgtaga

SEQ ID NO: 59445 - DNA, 22 bp, synthetic construct
  misc_feature 1..22: note = chemically synthesized
  source 1..22: mol_type = other DNA
tgtcctgtgtctctggcctggt

SEQ ID NO: 59446 - DNA, 22 bp, synthetic construct
  misc_feature 1..22: note = chemically synthesized
  source 1..22: mol_type = other DNA
tcctgtgtctctggcctggttt

SEQ ID NO: 59447 - DNA, 22 bp, synthetic construct
  misc_feature 1..22: note = chemically synthesized
  source 1..22: mol_type = other DNA
tgtctctggcctggtttcgggg

SEQ ID NO: 59448 - DNA, 22 bp, synthetic construct
  misc_feature 1..22: note = chemically synthesized
  source 1..22: mol_type = other DNA
tggcctggtttcggggaccagg

SEQ ID NO: 59449 - DNA, 22 bp, synthetic construct
  misc_feature 1..22: note = chemically synthesized
  source 1..22: mol_type = other DNA
gcctggtttcggggaccaggag

SEQ ID NO: 59450 - DNA, 22 bp, synthetic construct
  misc_feature 1..22: note = chemically synthesized
  source 1..22: mol_type = other DNA
gtttcggggaccaggagggcag

SEQ ID NO: 59451 - DNA, 22 bp, synthetic construct
  misc_feature 1..22: note = chemically synthesized
  source 1..22: mol_type = other DNA
cggggaccaggagggcagaccc

SEQ ID NO: 59452 - DNA, 22 bp, synthetic construct
  misc_feature 1..22: note = chemically synthesized
  source 1..22: mol_type = other DNA
ggggaccaggagggcagaccct

SEQ ID NO: 59453 - DNA, 22 bp, synthetic construct
  misc_feature 1..22: note = chemically synthesized
  source 1..22: mol_type = other DNA
gcactgccaagaagcatgccaa

SEQ ID NO: 59454 - DNA, 22 bp, synthetic construct
  misc_feature 1..22: note = chemically synthesized
  source 1..22: mol_type = other DNA
cactgccaagaagcatgccaaa

SEQ ID NO: 59455 - DNA, 22 bp, synthetic construct
  misc_feature 1..22: note = chemically synthesized
  source 1..22: mol_type = other DNA
ccaagaagcatgccaaagttaa

SEQ ID NO: 59456 - DNA, 22 bp, synthetic construct
  misc_feature 1..22: note = chemically synthesized
  source 1..22: mol_type = other DNA
atcattggccctgctgagtaca

SEQ ID NO: 59457 - DNA, 22 bp, synthetic construct
  misc_feature 1..22: note = chemically synthesized
  source 1..22: mol_type = other DNA
gccctgctgagtacatggccga

SEQ ID NO: 59458 - DNA, 22 bp, synthetic construct
  misc_feature 1..22: note = chemically synthesized
  source 1..22: mol_type = other DNA
ctgagtacatggccgatcaggc

SEQ ID NO: 59459 - DNA, 22 bp, synthetic construct
  misc_feature 1..22: note = chemically synthesized
  source 1..22: mol_type = other DNA
agtacatggccgatcaggctgt

SEQ ID NO: 59460 - DNA, 22 bp, synthetic construct
  misc_feature 1..22: note = chemically synthesized
  source 1..22: mol_type = other DNA
tttttgtgtgcctgtttttcta

SEQ ID NO: 59461 - DNA, 22 bp, synthetic construct
  misc_feature 1..22: note = chemically synthesized
  source 1..22: mol_type = other DNA
ttgtgtgcctgtttttctattt

SEQ ID NO: 59462 - DNA, 22 bp, synthetic construct
  misc_feature 1..22: note = chemically synthesized
  source 1..22: mol_type = other DNA
tgtgtgcctgtttttctatttt

SEQ ID NO: 59463 - DNA, 22 bp, synthetic construct
  misc_feature 1..22: note = chemically synthesized
  source 1..22: mol_type = other DNA
gtgtgcctgtttttctatttta

SEQ ID NO: 59464 - DNA, 22 bp, synthetic construct
  misc_feature 1..22: note = chemically synthesized
  source 1..22: mol_type = other DNA
tgtgcctgtttttctattttac

SEQ ID NO: 59465 - DNA, 22 bp, synthetic construct
  misc_feature 1..22: note = chemically synthesized
  source 1..22: mol_type = other DNA
tttttctattttacgtaaatca

SEQ ID NO: 59466 - DNA, 22 bp, synthetic construct
  misc_feature 1..22: note = chemically synthesized
  source 1..22: mol_type = other DNA
ttctattttacgtaaatcaccc

SEQ ID NO: 59467 - DNA, 22 bp, synthetic construct
  misc_feature 1..22: note = chemically synthesized
  source 1..22: mol_type = other DNA
tctattttacgtaaatcaccct

SEQ ID NO: 59468 - DNA, 22 bp, synthetic construct
  misc_feature 1..22: note = chemically synthesized
  source 1..22: mol_type = other DNA
ctattttacgtaaatcaccctg

SEQ ID NO: 59469 - DNA, 22 bp, synthetic construct
  misc_feature 1..22: note = chemically synthesized
  source 1..22: mol_type = other DNA
tattttacgtaaatcaccctga

SEQ ID NO: 59470 - DNA, 22 bp, synthetic construct
  misc_feature 1..22: note = chemically synthesized
  source 1..22: mol_type = other DNA
ttttacgtaaatcaccctgaac

SEQ ID NO: 59471 - DNA, 22 bp, synthetic construct
  misc_feature 1..22: note = chemically synthesized
  source 1..22: mol_type = other DNA
tacgtaaatcaccctgaacatg

SEQ ID NO: 59472 - DNA, 22 bp, synthetic construct
  misc_feature 1..22: note = chemically synthesized
  source 1..22: mol_type = other DNA
acgtaaatcaccctgaacatgt

SEQ ID NO: 59473 - DNA, 22 bp, synthetic construct
  misc_feature 1..22: note = chemically synthesized
  source 1..22: mol_type = other DNA
cgtaaatcaccctgaacatgtt

SEQ ID NO: 59474 - DNA, 22 bp, synthetic construct
  misc_feature 1..22: note = chemically synthesized
  source 1..22: mol_type = other DNA
aacatgtttgcatcaacctact

SEQ ID NO: 59475 - DNA, 22 bp, synthetic construct
  misc_feature 1..22: note = chemically synthesized
  source 1..22: mol_type = other DNA
gcatcaacctactggtgatgca

SEQ ID NO: 59476 - DNA, 22 bp, synthetic construct
  misc_feature 1..22: note = chemically synthesized
  source 1..22: mol_type = other DNA
catcaacctactggtgatgcac

SEQ ID NO: 59477 - DNA, 22 bp, synthetic construct
  misc_feature 1..22: note = chemically synthesized
  source 1..22: mol_type = other DNA
ctggtgatgcacctttgatcaa

SEQ ID NO: 59478 - DNA, 22 bp, synthetic construct
  misc_feature 1..22: note = chemically synthesized
  source 1..22: mol_type = other DNA
gtgatgcacctttgatcaatac

SEQ ID NO: 59479 - DNA, 22 bp, synthetic construct
  misc_feature 1..22: note = chemically synthesized
  source 1..22: mol_type = other DNA
tgatcaatacattttagacaaa

SEQ ID NO: 59480 - DNA, 22 bp, synthetic construct
  misc_feature 1..22: note = chemically synthesized
  source 1..22: mol_type = other DNA
gatcaatacattttagacaaac

SEQ ID NO: 59481 - DNA, 22 bp, synthetic construct
  misc_feature 1..22: note = chemically synthesized
  source 1..22: mol_type = other DNA
atcaatacattttagacaaacg

SEQ ID NO: 59482 - DNA, 22 bp, synthetic construct
  misc_feature 1..22: note = chemically synthesized
  source 1..22: mol_type = other DNA
tagacaaacgtggtttttgagt

SEQ ID NO: 59483 - DNA, 22 bp, synthetic construct
  misc_feature 1..22: note = chemically synthesized
  source 1..22: mol_type = other DNA
agacaaacgtggtttttgagtc

SEQ ID NO: 59484 - DNA, 22 bp, synthetic construct
  misc_feature 1..22: note = chemically synthesized
  source 1..22: mol_type = other DNA
gacaaacgtggtttttgagtcc

SEQ ID NO: 59485 - DNA, 22 bp, synthetic construct
  misc_feature 1..22: note = chemically synthesized
  source 1..22: mol_type = other DNA
ttgagtccaaagatcagggctg

SEQ ID NO: 59486 - DNA, 22 bp, synthetic construct
  misc_feature 1..22: note = chemically synthesized
  source 1..22: mol_type = other DNA
tgagtccaaagatcagggctgg

SEQ ID NO: 59487 - DNA, 22 bp, synthetic construct
  misc_feature 1..22: note = chemically synthesized
  source 1..22: mol_type = other DNA
gagtccaaagatcagggctggg

SEQ ID NO: 59488 - DNA, 22 bp, synthetic construct
  misc_feature 1..22: note = chemically synthesized
  source 1..22: mol_type = other DNA
agtccaaagatcagggctgggt

SEQ ID NO: 59489 - DNA, 22 bp, synthetic construct
  misc_feature 1..22: note = chemically synthesized
  source 1..22: mol_type = other DNA
ggttgacctgaatactggatac

SEQ ID NO: 59490 - DNA, 22 bp, synthetic construct
  misc_feature 1..22: note = chemically synthesized
  source 1..22: mol_type = other DNA
acctgaatactggatacagggc

SEQ ID NO: 59491 - DNA, 22 bp, synthetic construct
  misc_feature 1..22: note = chemically synthesized
  source 1..22: mol_type = other DNA
aatactggatacagggcatata

SEQ ID NO: 59492 - DNA, 22 bp, synthetic construct
  misc_feature 1..22: note = chemically synthesized
  source 1..22: mol_type = other DNA
gatacagggcatataaaacagg

SEQ ID NO: 59493 - DNA, 22 bp, synthetic construct
  misc_feature 1..22: note = chemically synthesized
  source 1..22: mol_type = other DNA
atagcagagcaatcaccaccaa

SEQ ID NO: 59494 - DNA, 22 bp, synthetic construct
  misc_feature 1..22: note = chemically synthesized
  source 1..22: mol_type = other DNA
gaataactgcaagggctctgct

SEQ ID NO: 59495 - DNA, 22 bp, synthetic construct
  misc_feature 1..22: note = chemically synthesized
  source 1..22: mol_type = other DNA
caagggctctgctgacatcttc

SEQ ID NO: 59496 - DNA, 22 bp, synthetic construct
  misc_feature 1..22: note = chemically synthesized
  source 1..22: mol_type = other DNA
tgctgacatcttcctgaggtgc

SEQ ID NO: 59497 - DNA, 22 bp, synthetic construct
  misc_feature 1..22: note = chemically synthesized
  source 1..22: mol_type = other DNA
ctgacatcttcctgaggtgcca

SEQ ID NO: 59498 - DNA, 22 bp, synthetic construct
  misc_feature 1..22: note = chemically synthesized
  source 1..22: mol_type = other DNA
acatcttcctgaggtgccaagg

SEQ ID NO: 59499 - DNA, 22 bp, synthetic construct
  misc_feature 1..22: note = chemically synthesized
  source 1..22: mol_type = other DNA
cctgaggtgccaaggaaatgag

SEQ ID NO: 59500 - DNA, 22 bp, synthetic construct
  misc_feature 1..22: note = chemically synthesized
  source 1..22: mol_type = other DNA
ctgaggtgccaaggaaatgagg

SEQ ID NO: 59501 - DNA, 22 bp, synthetic construct
  misc_feature 1..22: note = chemically synthesized
  source 1..22: mol_type = other DNA
aggtgccaaggaaatgaggatg

SEQ ID NO: 59502 - DNA, 22 bp, synthetic construct
  misc_feature 1..22: note = chemically synthesized
  source 1..22: mol_type = other DNA
tccatgactttgggatccagtc

SEQ ID NO: 59503 - DNA, 22 bp, synthetic construct
  misc_feature 1..22: note = chemically synthesized
  source 1..22: mol_type = other DNA
catgactttgggatccagtcaa

SEQ ID NO: 59504 - DNA, 22 bp, synthetic construct
  misc_feature 1..22: note = chemically synthesized
  source 1..22: mol_type = other DNA
tgggatccagtcaacacattac

SEQ ID NO: 59505 - DNA, 22 bp, synthetic construct
  misc_feature 1..22: note = chemically synthesized
  source 1..22: mol_type = other DNA
gggatccagtcaacacattacc

SEQ ID NO: 59506 - DNA, 22 bp, synthetic construct
  misc_feature 1..22: note = chemically synthesized
  source 1..22: mol_type = other DNA
ggatccagtcaacacattacct

SEQ ID NO: 59507 - DNA, 22 bp, synthetic construct
  misc_feature 1..22: note = chemically synthesized
  source 1..22: mol_type = other DNA
cctccaggtgaattaccaagac

SEQ ID NO: 59508 - DNA, 22 bp, synthetic construct
  misc_feature 1..22: note = chemically synthesized
  source 1..22: mol_type = other DNA
caggtgaattaccaagactccc

SEQ ID NO: 59509 - DNA, 22 bp, synthetic construct
  misc_feature 1..22: note = chemically synthesized
  source 1..22: mol_type = other DNA
ccaagactcccaggactggttc

SEQ ID NO: 59510 - DNA, 22 bp, synthetic construct
  misc_feature 1..22: note = chemically synthesized
  source 1..22: mol_type = other DNA
ccaggactggttcatcttggtg

SEQ ID NO: 59511 - DNA, 22 bp, synthetic construct
  misc_feature 1..22: note = chemically synthesized
  source 1..22: mol_type = other DNA
gttcatcttggtgtccgtgatc

SEQ ID NO: 59512 - DNA, 22 bp, synthetic construct
  misc_feature 1..22: note = chemically synthesized
  source 1..22: mol_type = other DNA
atcttggtgtccgtgatcgcag

SEQ ID NO: 59513 - DNA, 22 bp, synthetic construct
  misc_feature 1..22: note = chemically synthesized
  source 1..22: mol_type = other DNA
ggtgtccgtgatcgcagacctc

SEQ ID NO: 59514 - DNA, 22 bp, synthetic construct
  misc_feature 1..22: note = chemically synthesized
  source 1..22: mol_type = other DNA
gtgtccgtgatcgcagacctca

SEQ ID NO: 59515 - DNA, 22 bp, synthetic construct
  misc_feature 1..22: note = chemically synthesized
  source 1..22: mol_type = other DNA
aggaatgccttctacgtcctct

SEQ ID NO: 59516 - DNA, 22 bp, synthetic construct
  misc_feature 1..22: note = chemically synthesized
  source 1..22: mol_type = other DNA
ctacgtcctcttccccatctgg

SEQ ID NO: 59517 - DNA, 22 bp, synthetic construct
  misc_feature 1..22: note = chemically synthesized
  source 1..22: mol_type = other DNA
tacgtcctcttccccatctggt

SEQ ID NO: 59518 - DNA, 22 bp, synthetic construct
  misc_feature 1..22: note = chemically synthesized
  source 1..22: mol_type = other DNA
cgtcctcttccccatctggttc

SEQ ID NO: 59519 - DNA, 22 bp, synthetic construct
  misc_feature 1..22: note = chemically synthesized
  source 1..22: mol_type = other DNA
ttccccatctggttccatcttc

SEQ ID NO: 59520 - DNA, 22 bp, synthetic construct
  misc_feature 1..22: note = chemically synthesized
  source 1..22: mol_type = other DNA
ccccatctggttccatcttcag

SEQ ID NO: 59521 - DNA, 22 bp, synthetic construct
  misc_feature 1..22: note = chemically synthesized
  source 1..22: mol_type = other DNA
cccatctggttccatcttcagg

SEQ ID NO: 59522 - DNA, 22 bp, synthetic construct
  misc_feature 1..22: note = chemically synthesized
  source 1..22: mol_type = other DNA
gttccatcttcaggaagctgtg

SEQ ID NO: 59523 - DNA, 22 bp, synthetic construct
  misc_feature 1..22: note = chemically synthesized
  source 1..22: mol_type = other DNA
catcttcaggaagctgtgggca

SEQ ID NO: 59524 - DNA, 22 bp, synthetic construct
  misc_feature 1..22: note = chemically synthesized
  source 1..22: mol_type = other DNA
caggaagctgtgggcattaaac

SEQ ID NO: 59525 - DNA, 22 bp, synthetic construct
  misc_feature 1..22: note = chemically synthesized
  source 1..22: mol_type = other DNA
aggaagctgtgggcattaaact

SEQ ID NO: 59526 - DNA, 22 bp, synthetic construct
  misc_feature 1..22: note = chemically synthesized
  source 1..22: mol_type = other DNA
tgggcattaaactcctttgggt

SEQ ID NO: 59527 - DNA, 22 bp, synthetic construct
  misc_feature 1..22: note = chemically synthesized
  source 1..22: mol_type = other DNA
aactcctttgggtagctgtgat

SEQ ID NO: 59528 - DNA, 22 bp, synthetic construct
  misc_feature 1..22: note = chemically synthesized
  source 1..22: mol_type = other DNA
ctttgggtagctgtgattggag

SEQ ID NO: 59529 - DNA, 22 bp, synthetic construct
  misc_feature 1..22: note = chemically synthesized
  source 1..22: mol_type = other DNA
tgggtagctgtgattggagact

SEQ ID NO: 59530 - DNA, 22 bp, synthetic construct
  misc_feature 1..22: note = chemically synthesized
  source 1..22: mol_type = other DNA
gggtagctgtgattggagactg

SEQ ID NO: 59531 - DNA, 22 bp, synthetic construct
  misc_feature 1..22: note = chemically synthesized
  source 1..22: mol_type = other DNA
ggtagctgtgattggagactgg

SEQ ID NO: 59532 - DNA, 22 bp, synthetic construct
  misc_feature 1..22: note = chemically synthesized
  source 1..22: mol_type = other DNA
tgattggagactggctcaacct

SEQ ID NO: 59533 - DNA, 22 bp, synthetic construct
  misc_feature 1..22: note = chemically synthesized
  source 1..22: mol_type = other DNA
gagactggctcaacctcgtctt

SEQ ID NO: 59534 - DNA, 22 bp, synthetic construct
  misc_feature 1..22: note = chemically synthesized
  source 1..22: mol_type = other DNA
gctcaacctcgtctttaagtgg

SEQ ID NO: 59535 - DNA, 22 bp, synthetic construct
  misc_feature 1..22: note = chemically synthesized
  source 1..22: mol_type = other DNA
aacctcgtctttaagtggtaag

SEQ ID NO: 59536 - DNA, 22 bp, synthetic construct
  misc_feature 1..22: note = chemically synthesized
  source 1..22: mol_type = other DNA
gtctttaagtggtaagaaccat

SEQ ID NO: 59537 - DNA, 22 bp, synthetic construct
  misc_feature 1..22: note = chemically synthesized
  source 1..22: mol_type = other DNA
taagtggtaagaaccatataga

SEQ ID NO: 59538 - DNA, 22 bp, synthetic construct
  misc_feature 1..22: note = chemically synthesized
  source 1..22: mol_type = other DNA
aagtggtaagaaccatatagag

SEQ ID NO: 59539 - DNA, 22 bp, synthetic construct
  misc_feature 1..22: note = chemically synthesized
  source 1..22: mol_type = other DNA
agtggtaagaaccatatagaga

SEQ ID NO: 59540 - DNA, 22 bp, synthetic construct
  misc_feature 1..22: note = chemically synthesized
  source 1..22: mol_type = other DNA
gcattcgctctcgcaatgtctg

SEQ ID NO: 59541 - DNA, 22 bp, synthetic construct
  misc_feature 1..22: note = chemically synthesized
  source 1..22: mol_type = other DNA
gctctcgcaatgtctgtccatc

SEQ ID NO: 59542 - DNA, 22 bp, synthetic construct
  misc_feature 1..22: note = chemically synthesized
  source 1..22: mol_type = other DNA
tcgcaatgtctgtccatcagaa

SEQ ID NO: 59543 - DNA, 22 bp, synthetic construct
  misc_feature 1..22: note = chemically synthesized
  source 1..22: mol_type = other DNA
gcaatgtctgtccatcagaagt

SEQ ID NO: 59544 - DNA, 22 bp, synthetic construct
  misc_feature 1..22: note = chemically synthesized
  source 1..22: mol_type = other DNA
tccatcagaagttgctttcccc

SEQ ID NO: 59545 - DNA, 22 bp, synthetic construct
  misc_feature 1..22: note = chemically synthesized
  source 1..22: mol_type = other DNA
ctttccccaggctattcaggaa

SEQ ID NO: 59546 - DNA, 22 bp, synthetic construct
  misc_feature 1..22: note = chemically synthesized
  source 1..22: mol_type = other DNA
tccccaggctattcaggaagcc

SEQ ID NO: 59547 - DNA, 22 bp, synthetic construct
  misc_feature 1..22: note = chemically synthesized
  source 1..22: mol_type = other DNA
ccccaggctattcaggaagcca

SEQ ID NO: 59548 - DNA, 22 bp, synthetic construct
  misc_feature 1..22: note = chemically synthesized
  source 1..22: mol_type = other DNA
cccaggctattcaggaagccac

SEQ ID NO: 59549 - DNA, 22 bp, synthetic construct
  misc_feature 1..22: note = chemically synthesized
  source 1..22: mol_type = other DNA
ttcaggaagccacgggctactc

SEQ ID NO: 59550 - DNA, 22 bp, synthetic construct
  misc_feature 1..22: note = chemically synthesized
  source 1..22: mol_type = other DNA
aggaagccacgggctactcatg

SEQ ID NO: 59551 - DNA, 22 bp, synthetic construct
  misc_feature 1..22: note = chemically synthesized
  source 1..22: mol_type = other DNA
ctcatgcttccaacccctctct

SEQ ID NO: 59552 - DNA, 22 bp, synthetic construct
  misc_feature 1..22: note = chemically synthesized
  source 1..22: mol_type = other DNA
atgcttccaacccctctctctg

SEQ ID NO: 59553 - DNA, 22 bp, synthetic construct
  misc_feature 1..22: note = chemically synthesized
  source 1..22: mol_type = other DNA
ccaacccctctctctgactttg

SEQ ID NO: 59554 - DNA, 22 bp, synthetic construct
  misc_feature 1..22: note = chemically synthesized
  source 1..22: mol_type = other DNA
caacccctctctctgactttgg

SEQ ID NO: 59555 - DNA, 22 bp, synthetic construct
  misc_feature 1..22: note = chemically synthesized
  source 1..22: mol_type = other DNA
tctctgactttggatcatctac

SEQ ID NO: 59556 - DNA, 22 bp, synthetic construct
  misc_feature 1..22: note = chemically synthesized
  source 1..22: mol_type = other DNA
tctgactttggatcatctacat

SEQ ID NO: 59557 - DNA, 22 bp, synthetic construct
  misc_feature 1..22: note = chemically synthesized
  source 1..22: mol_type = other DNA
tgactttggatcatctacataa

SEQ ID NO: 59558 - DNA, 22 bp, synthetic construct
  misc_feature 1..22: note = chemically synthesized
  source 1..22: mol_type = other DNA
actttggatcatctacataaag

SEQ ID NO: 59559 - DNA, 22 bp, synthetic construct
  misc_feature 1..22: note = chemically synthesized
  source 1..22: mol_type = other DNA
tggatcatctacataaaggggg

SEQ ID NO: 59560 - DNA, 22 bp, synthetic construct
  misc_feature 1..22: note = chemically synthesized
  source 1..22: mol_type = other DNA
ggatcatctacataaaggggga

SEQ ID NO: 59561 - DNA, 22 bp, synthetic construct
  misc_feature 1..22: note = chemically synthesized
  source 1..22: mol_type = other DNA
gatcatctacataaagggggaa

SEQ ID NO: 59562 - DNA, 22 bp, synthetic construct
  misc_feature 1..22: note = chemically synthesized
  source 1..22: mol_type = other DNA
cataaagggggaagacagaaaa

SEQ ID NO: 59563 - DNA, 22 bp, synthetic construct
  misc_feature 1..22: note = chemically synthesized
  source 1..22: mol_type = other DNA
ccagtgagttgaaaatacagga

SEQ ID NO: 59564 - DNA, 22 bp, synthetic construct
  misc_feature 1..22: note = chemically synthesized
  source 1..22: mol_type = other DNA
aaaatacaggaaagcctatttc

SEQ ID NO: 59565 - DNA, 22 bp, synthetic construct
  misc_feature 1..22: note = chemically synthesized
  source 1..22: mol_type = other DNA
tttcatatgggttaaagggtag

SEQ ID NO: 59566 - DNA, 22 bp, synthetic construct
  misc_feature 1..22: note = chemically synthesized
  source 1..22: mol_type = other DNA
catatgggttaaagggtaggac

SEQ ID NO: 59567 - DNA, 22 bp, synthetic construct
  misc_feature 1..22: note = chemically synthesized
  source 1..22: mol_type = other DNA
atatgggttaaagggtaggaca

SEQ ID NO: 59568 - DNA, 22 bp, synthetic construct
  misc_feature 1..22: note = chemically synthesized
  source 1..22: mol_type = other DNA
aagggtaggacagttgaatttc

SEQ ID NO: 59569 - DNA, 22 bp, synthetic construct
  misc_feature 1..22: note = chemically synthesized
  source 1..22: mol_type = other DNA
aatttcgtgaaaagtctgagtt

SEQ ID NO: 59570 - DNA, 22 bp, synthetic construct
  misc_feature 1..22: note = chemically synthesized
  source 1..22: mol_type = other DNA
cgtgaaaagtctgagttatata

SEQ ID NO: 59571 - DNA, 22 bp, synthetic construct
  misc_feature 1..22: note = chemically synthesized
  source 1..22: mol_type = other DNA
gtgaaaagtctgagttatatag

SEQ ID NO: 59572 - DNA, 22 bp, synthetic construct
  misc_feature 1..22: note = chemically synthesized
  source 1..22: mol_type = other DNA
agttatataggctttgagcaaa

SEQ ID NO: 59573 - DNA, 22 bp, synthetic construct
  misc_feature 1..22: note = chemically synthesized
  source 1..22: mol_type = other DNA
tataggctttgagcaaagagtt

SEQ ID NO: 59574 - DNA, 22 bp, synthetic construct
  misc_feature 1..22: note = chemically synthesized
  source 1..22: mol_type = other DNA
tgagcaaagagttttattagta

SEQ ID NO: 59575 - DNA, 22 bp, synthetic construct
  misc_feature 1..22: note = chemically synthesized
  source 1..22: mol_type = other DNA
gagcaaagagttttattagtat

SEQ ID NO: 59576 - DNA, 22 bp, synthetic construct
  misc_feature 1..22: note = chemically synthesized
  source 1..22: mol_type = other DNA
agcaaagagttttattagtatg

SEQ ID NO: 59577 - DNA, 22 bp, synthetic construct
  misc_feature 1..22: note = chemically synthesized
  source 1..22: mol_type = other DNA
tattagtatgaagcagaagagg

SEQ ID NO: 59578 - DNA, 22 bp, synthetic construct
  misc_feature 1..22: note = chemically synthesized
  source 1..22: mol_type = other DNA
attagtatgaagcagaagaggt

SEQ ID NO: 59579 - DNA, 22 bp, synthetic construct
  misc_feature 1..22: note = chemically synthesized
  source 1..22: mol_type = other DNA
ttagtatgaagcagaagaggta

SEQ ID NO: 59580 - DNA, 22 bp, synthetic construct
  misc_feature 1..22: note = chemically synthesized
  source 1..22: mol_type = other DNA
gtatgaagcagaagaggtaaca

SEQ ID NO: 59581 - DNA, 22 bp, synthetic construct
  misc_feature 1..22: note = chemically synthesized
  source 1..22: mol_type = other DNA
acacctgtaatcccagcacttt

SEQ ID NO: 59582 - DNA, 22 bp, synthetic construct
  misc_feature 1..22: note = chemically synthesized
  source 1..22: mol_type = other DNA
taatcccagcactttgggaggc

SEQ ID NO: 59583 - DNA, 22 bp, synthetic construct
  misc_feature 1..22: note = chemically synthesized
  source 1..22: mol_type = other DNA
tgggaggccgaggtgggcgaat

SEQ ID NO: 59584 - DNA, 22 bp, synthetic construct
  misc_feature 1..22: note = chemically synthesized
  source 1..22: mol_type = other DNA
gggaggccgaggtgggcgaatc

SEQ ID NO: 59585 - DNA, 22 bp, synthetic construct
  misc_feature 1..22: note = chemically synthesized
  source 1..22: mol_type = other DNA
ggaggccgaggtgggcgaatca

SEQ ID NO: 59586 - DNA, 22 bp, synthetic construct
  misc_feature 1..22: note = chemically synthesized
  source 1..22: mol_type = other DNA
ctgggtgaactcaggagttcaa

SEQ ID NO: 59587 - DNA, 22 bp, synthetic construct
  misc_feature 1..22: note = chemically synthesized
  source 1..22: mol_type = other DNA
ggtgaactcaggagttcaagac

SEQ ID NO: 59588 - DNA, 22 bp, synthetic construct
  misc_feature 1..22: note = chemically synthesized
  source 1..22: mol_type = other DNA
aggagttcaagaccagcctggg

SEQ ID NO: 59589 - DNA, 22 bp, synthetic construct
  misc_feature 1..22: note = chemically synthesized
  source 1..22: mol_type = other DNA
aagaccagcctgggcaacatgg

SEQ ID NO: 59590 - DNA, 22 bp, synthetic construct
  misc_feature 1..22: note = chemically synthesized
  source 1..22: mol_type = other DNA
ggcaacatggcgaaactccatc

SEQ ID NO: 59591 - DNA, 22 bp, synthetic construct
  misc_feature 1..22: note = chemically synthesized
  source 1..22: mol_type = other DNA
catctctacaaaaacattacga

SEQ ID NO: 59592 - DNA, 22 bp, synthetic construct
  misc_feature 1..22: note = chemically synthesized
  source 1..22: mol_type = other DNA
tacaaaaacattacgaaaatta

SEQ ID NO: 59593 - DNA, 22 bp, synthetic construct
  misc_feature 1..22: note = chemically synthesized
  source 1..22: mol_type = other DNA
caaaaacattacgaaaattagc

SEQ ID NO: 59594 - DNA, 22 bp, synthetic construct
  misc_feature 1..22: note = chemically synthesized
  source 1..22: mol_type = other DNA
cgaaaattagctgggcgtgttg

SEQ ID NO: 59595 - DNA, 22 bp, synthetic construct
  misc_feature 1..22: note = chemically synthesized
  source 1..22: mol_type = other DNA
gctgggcgtgttggtgctgtag

SEQ ID NO: 59596 - DNA, 22 bp, synthetic construct
  misc_feature 1..22: note = chemically synthesized
  source 1..22: mol_type = other DNA
ggcgtgttggtgctgtagtccc

SEQ ID NO: 59597 - DNA, 22 bp, synthetic construct
  misc_feature 1..22: note = chemically synthesized
  source 1..22: mol_type = other DNA
gtgctgtagtcccagctactca

SEQ ID NO: 59598 - DNA, 22 bp, synthetic construct
  misc_feature 1..22: note = chemically synthesized
  source 1..22: mol_type = other DNA
tagtcccagctactcaggaggc

SEQ ID NO: 59599 - DNA, 22 bp, synthetic construct
  misc_feature 1..22: note = chemically synthesized
  source 1..22: mol_type = other DNA
ctcaggaggctgaggtgagagg

SEQ ID NO: 59600 - DNA, 22 bp, synthetic construct
  misc_feature 1..22: note = chemically synthesized
  source 1..22: mol_type = other DNA
aggaggctgaggtgagaggcgg

SEQ ID NO: 59601 - DNA, 22 bp, synthetic construct
  misc_feature 1..22: note = chemically synthesized
  source 1..22: mol_type = other DNA
aggtgagaggcggaggaggttg

SEQ ID NO: 59602 - DNA, 22 bp, synthetic construct
  misc_feature 1..22: note = chemically synthesized
  source 1..22: mol_type = other DNA
cagtgagtcaagatcatgccac

SEQ ID NO: 59603 - DNA, 22 bp, synthetic construct
  misc_feature 1..22: note = chemically synthesized
  source 1..22: mol_type = other DNA
cactccagcctgggcaacagag

SEQ ID NO: 59604 - DNA, 22 bp, synthetic construct
  misc_feature 1..22: note = chemically synthesized
  source 1..22: mol_type = other DNA
cagcctgggcaacagagtaaga

SEQ ID NO: 59605 - DNA, 22 bp, synthetic construct
  misc_feature 1..22: note = chemically synthesized
  source 1..22: mol_type = other DNA
ggcaacagagtaagaccctgtc

SEQ ID NO: 59606 - DNA, 22 bp, synthetic construct
  misc_feature 1..22: note = chemically synthesized
  source 1..22: mol_type = other DNA
tctcaaaaaaaaaaaaaagata

SEQ ID NO: 59607 - DNA, 22 bp, synthetic construct
  misc_feature 1..22: note = chemically synthesized
  source 1..22: mol_type = other DNA
aaaaaaaaaaaaaagatagatg

SEQ ID NO: 59608 - DNA, 22 bp, synthetic construct
  misc_feature 1..22: note = chemically synthesized
  source 1..22: mol_type = other DNA
tatgaaaaaaggaaacacacag

SEQ ID NO: 59609 - DNA, 22 bp, synthetic construct
  misc_feature 1..22: note = chemically synthesized
  source 1..22: mol_type = other DNA
aacagcctgttttgtggggtaa

SEQ ID NO: 59610 - DNA, 22 bp, synthetic construct
  misc_feature 1..22: note = chemically synthesized
  source 1..22: mol_type = other DNA
ttttgtggggtaatgaaaagtc

SEQ ID NO: 59611 - DNA, 22 bp, synthetic construct
  misc_feature 1..22: note = chemically synthesized
  source 1..22: mol_type = other DNA
tgtggggtaatgaaaagtcacc

SEQ ID NO: 59612 - DNA, 22 bp, synthetic construct
  misc_feature 1..22: note = chemically synthesized
  source 1..22: mol_type = other DNA
gtggggtaatgaaaagtcaccc

SEQ ID NO: 59613 - DNA, 22 bp, synthetic construct
  misc_feature 1..22: note = chemically synthesized
  source 1..22: mol_type = other DNA
tggggtaatgaaaagtcaccct

SEQ ID NO: 59614 - DNA, 22 bp, synthetic construct
  misc_feature 1..22: note = chemically synthesized
  source 1..22: mol_type = other DNA
ggaactgggctccagccctcgt

SEQ ID NO: 59615 - DNA, 22 bp, synthetic construct
  misc_feature 1..22: note = chemically synthesized
  source 1..22: mol_type = other DNA
ggctccagccctcgttctgcca

SEQ ID NO: 59616 - DNA, 22 bp, synthetic construct
  misc_feature 1..22: note = chemically synthesized
  source 1..22: mol_type = other DNA
cagccctcgttctgccacccac

SEQ ID NO: 59617 - DNA, 22 bp, synthetic construct
  misc_feature 1..22: note = chemically synthesized
  source 1..22: mol_type = other DNA
gttctgccacccaccaactaca

SEQ ID NO: 59618 - DNA, 22 bp, synthetic construct
  misc_feature 1..22: note = chemically synthesized
  source 1..22: mol_type = other DNA
tgccacccaccaactacatgtc

SEQ ID NO: 59619 - DNA, 22 bp, synthetic construct
  misc_feature 1..22: note = chemically synthesized
  source 1..22: mol_type = other DNA
ccacccaccaactacatgtcct

SEQ ID NO: 59620 - DNA, 22 bp, synthetic construct
  misc_feature 1..22: note = chemically synthesized
  source 1..22: mol_type = other DNA
catgtccttggcaagtcatatc

SEQ ID NO: 59621 - DNA, 22 bp, synthetic construct
  misc_feature 1..22: note = chemically synthesized
  source 1..22: mol_type = other DNA
ggcaagtcatatcaattatctg

SEQ ID NO: 59622 - DNA, 22 bp, synthetic construct
  misc_feature 1..22: note = chemically synthesized
  source 1..22: mol_type = other DNA
gcaagtcatatcaattatctga

SEQ ID NO: 59623 - DNA, 22 bp, synthetic construct
  misc_feature 1..22: note = chemically synthesized
  source 1..22: mol_type = other DNA
tctgagtttctgttttataatc

SEQ ID NO: 59624 - DNA, 22 bp, synthetic construct
  misc_feature 1..22: note = chemically synthesized
  source 1..22: mol_type = other DNA
agtttctgttttataatctaca

SEQ ID NO: 59625 - DNA, 22 bp, synthetic construct
  misc_feature 1..22: note = chemically synthesized
  source 1..22: mol_type = other DNA
ctgttttataatctacaaatag

SEQ ID NO: 59626 - DNA, 22 bp, synthetic construct
  misc_feature 1..22: note = chemically synthesized
  source 1..22: mol_type = other DNA
tgttttataatctacaaatagg

SEQ ID NO: 59627 - DNA, 22 bp, synthetic construct
  misc_feature 1..22: note = chemically synthesized
  source 1..22: mol_type = other DNA
ttttataatctacaaataggtt

SEQ ID NO: 59628 - DNA, 22 bp, synthetic construct
  misc_feature 1..22: note = chemically synthesized
  source 1..22: mol_type = other DNA
tataatctacaaataggttatc

SEQ ID NO: 59629 - DNA, 22 bp, synthetic construct
  misc_feature 1..22: note = chemically synthesized
  source 1..22: mol_type = other DNA
ataatctacaaataggttatct

SEQ ID NO: 59630 - DNA, 22 bp, synthetic construct
  misc_feature 1..22: note = chemically synthesized
  source 1..22: mol_type = other DNA
taatctacaaataggttatctc

SEQ ID NO: 59631 - DNA, 22 bp, synthetic construct
  misc_feature 1..22: note = chemically synthesized
  source 1..22: mol_type = other DNA
caaataggttatctctggcagc

SEQ ID NO: 59632 - DNA, 22 bp, synthetic construct
  misc_feature 1..22: note = chemically synthesized
  source 1..22: mol_type = other DNA
tctctggcagcttaataataat

SEQ ID NO: 59633 - DNA, 22 bp, synthetic construct
  misc_feature 1..22: note = chemically synthesized
  source 1..22: mol_type = other DNA
tggcagcttaataataatcagg

SEQ ID NO: 59634 - DNA, 22 bp, synthetic construct
  misc_feature 1..22: note = chemically synthesized
  source 1..22: mol_type = other DNA
gcagcttaataataatcagggt

SEQ ID NO: 59635 - DNA, 22 bp, synthetic construct
  misc_feature 1..22: note = chemically synthesized
  source 1..22: mol_type = other DNA
aataataatcagggttaacatt

SEQ ID NO: 59636 - DNA, 22 bp, synthetic construct
  misc_feature 1..22: note = chemically synthesized
  source 1..22: mol_type = other DNA
ataataatcagggttaacattt

SEQ ID NO: 59637 - DNA, 22 bp, synthetic construct
  misc_feature 1..22: note = chemically synthesized
  source 1..22: mol_type = other DNA
acatttattaaacagtgtgtgc

SEQ ID NO: 59638 - DNA, 22 bp, synthetic construct
  misc_feature 1..22: note = chemically synthesized
  source 1..22: mol_type = other DNA
attaaacagtgtgtgccagtcc

SEQ ID NO: 59639 - DNA, 22 bp, synthetic construct
  misc_feature 1..22: note = chemically synthesized
  source 1..22: mol_type = other DNA
ttaaacagtgtgtgccagtcca

SEQ ID NO: 59640 - DNA, 22 bp, synthetic construct
  misc_feature 1..22: note = chemically synthesized
  source 1..22: mol_type = other DNA
aacagtgtgtgccagtccatgt

SEQ ID NO: 59641 - DNA, 22 bp, synthetic construct
  misc_feature 1..22: note = chemically synthesized
  source 1..22: mol_type = other DNA
tgtgcttttctgtgaggtagtt

SEQ ID NO: 59642 - DNA, 22 bp, synthetic construct
  misc_feature 1..22: note = chemically synthesized
  source 1..22: mol_type = other DNA
ttctgtgaggtagttactgcta

SEQ ID NO: 59643 - DNA, 22 bp, synthetic construct
  misc_feature 1..22: note = chemically synthesized
  source 1..22: mol_type = other DNA
tctgtgaggtagttactgctat

SEQ ID NO: 59644 - DNA, 22 bp, synthetic construct
  misc_feature 1..22: note = chemically synthesized
  source 1..22: mol_type = other DNA
ctgtgaggtagttactgctatt

SEQ ID NO: 59645 - DNA, 22 bp, synthetic construct
  misc_feature 1..22: note = chemically synthesized
  source 1..22: mol_type = other DNA
tgtgaggtagttactgctattt

SEQ ID NO: 59646 - DNA, 22 bp, synthetic construct
  misc_feature 1..22: note = chemically synthesized
  source 1..22: mol_type = other DNA
tgaggtagttactgctatttac

SEQ ID NO: 59647 - DNA, 22 bp, synthetic construct
  misc_feature 1..22: note = chemically synthesized
  source 1..22: mol_type = other DNA
ctgctatttacagaaacagtag

SEQ ID NO: 59648 - DNA, 22 bp, synthetic construct
  misc_feature 1..22: note = chemically synthesized
  source 1..22: mol_type = other DNA
ctatttacagaaacagtagatg

SEQ ID NO: 59649 - DNA, 22 bp, synthetic construct
  misc_feature 1..22: note = chemically synthesized
  source 1..22: mol_type = other DNA
tttacagaaacagtagatgcag

SEQ ID NO: 59650 - DNA, 22 bp, synthetic construct
  misc_feature 1..22: note = chemically synthesized
  source 1..22: mol_type = other DNA
acagaaacagtagatgcagaga

SEQ ID NO: 59651 - DNA, 22 bp, synthetic construct
  misc_feature 1..22: note = chemically synthesized
  source 1..22: mol_type = other DNA
cagaaacagtagatgcagagac

SEQ ID NO: 59652 - DNA, 22 bp, synthetic construct
  misc_feature 1..22: note = chemically synthesized
  source 1..22: mol_type = other DNA
agttaaatgattaggccaacaa

SEQ ID NO: 59653 - DNA, 22 bp, synthetic construct
  misc_feature 1..22: note = chemically synthesized
  source 1..22: mol_type = other DNA
aatgattaggccaacaaggtta

SEQ ID NO: 59654 - DNA, 22 bp, synthetic construct
  misc_feature 1..22: note = chemically synthesized
  source 1..22: mol_type = other DNA
ggccaacaaggttagtacatgc

SEQ ID NO: 59655 - DNA, 22 bp, synthetic construct
  misc_feature 1..22: note = chemically synthesized
  source 1..22: mol_type = other DNA
gtacatgccgagccaggatgga

SEQ ID NO: 59656 - DNA, 22 bp, synthetic construct
  misc_feature 1..22: note = chemically synthesized
  source 1..22: mol_type = other DNA
gcttccgcggcaatgctcttat

SEQ ID NO: 59657 - DNA, 22 bp, synthetic construct
  misc_feature 1..22: note = chemically synthesized
  source 1..22: mol_type = other DNA
ccgcggcaatgctcttatgaac

SEQ ID NO: 59658 - DNA, 22 bp, synthetic construct
  misc_feature 1..22: note = chemically synthesized
  source 1..22: mol_type = other DNA
cgcggcaatgctcttatgaact

SEQ ID NO: 59659 - DNA, 22 bp, synthetic construct
  misc_feature 1..22: note = chemically synthesized
  source 1..22: mol_type = other DNA
ttatgaactatgttacgtccag

SEQ ID NO: 59660 - DNA, 22 bp, synthetic construct
  misc_feature 1..22: note = chemically synthesized
  source 1..22: mol_type = other DNA
atgaactatgttacgtccagtg

SEQ ID NO: 59661 - DNA, 22 bp, synthetic construct
  misc_feature 1..22: note = chemically synthesized
  source 1..22: mol_type = other DNA
tgaactatgttacgtccagtgc

SEQ ID NO: 59662 - DNA, 22 bp, synthetic construct
  misc_feature 1..22: note = chemically synthesized
  source 1..22: mol_type = other DNA
tgttacgtccagtgctgataaa

SEQ ID NO: 59663 - DNA, 22 bp, synthetic construct
  misc_feature 1..22: note = chemically synthesized
  source 1..22: mol_type = other DNA
cgtccagtgctgataaactgac

SEQ ID NO: 59664 - DNA, 22 bp, synthetic construct
  misc_feature 1..22: note = chemically synthesized
  source 1..22: mol_type = other DNA
ataaactgactctctggggagc

SEQ ID NO: 59665 - DNA, 22 bp, synthetic construct
  misc_feature 1..22: note = chemically synthesized
  source 1..22: mol_type = other DNA
actctctggggagcaggggaaa

SEQ ID NO: 59666 - DNA, 22 bp, synthetic construct
  misc_feature 1..22: note = chemically synthesized
  source 1..22: mol_type = other DNA
tctggggagcaggggaaagccc

SEQ ID NO: 59667 - DNA, 22 bp, synthetic construct
  misc_feature 1..22: note = chemically synthesized
  source 1..22: mol_type = other DNA
tggggagcaggggaaagccctg

SEQ ID NO: 59668 - DNA, 22 bp, synthetic construct
  misc_feature 1..22: note = chemically synthesized
  source 1..22: mol_type = other DNA
gggagcaggggaaagccctgag

SEQ ID NO: 59669 - DNA, 22 bp, synthetic construct
  misc_feature 1..22: note = chemically synthesized
  source 1..22: mol_type = other DNA
agtttagcatttgccaatttct

SEQ ID NO: 59670 - DNA, 22 bp, synthetic construct
  misc_feature 1..22: note = chemically synthesized
  source 1..22: mol_type = other DNA
agcatttgccaatttctatcac

SEQ ID NO: 59671 - DNA, 22 bp, synthetic construct
  misc_feature 1..22: note = chemically synthesized
  source 1..22: mol_type = other DNA
gcatttgccaatttctatcacg

SEQ ID NO: 59672 - DNA, 22 bp, synthetic construct
  misc_feature 1..22: note = chemically synthesized
  source 1..22: mol_type = other DNA
gccaatttctatcacgtaaaca

SEQ ID NO: 59673 - DNA, 22 bp, synthetic construct
  misc_feature 1..22: note = chemically synthesized
  source 1..22: mol_type = other DNA
ccaatttctatcacgtaaacat

SEQ ID NO: 59674 - DNA, 22 bp, synthetic construct
  misc_feature 1..22: note = chemically synthesized
  source 1..22: mol_type = other DNA
ctatcacgtaaacattcccatt

SEQ ID NO: 59675 - DNA, 22 bp, synthetic construct
  misc_feature 1..22: note = chemically synthesized
  source 1..22: mol_type = other DNA
tatcacgtaaacattcccattc

SEQ ID NO: 59676 - DNA, 22 bp, synthetic construct
  misc_feature 1..22: note = chemically synthesized
  source 1..22: mol_type = other DNA
tcacgtaaacattcccattctg

SEQ ID NO: 59677 - DNA, 22 bp, synthetic construct
  misc_feature 1..22: note = chemically synthesized
  source 1..22: mol_type = other DNA
ccattctggccactttctttct

SEQ ID NO: 59678 - DNA, 22 bp, synthetic construct
  misc_feature 1..22: note = chemically synthesized
  source 1..22: mol_type = other DNA
tggccactttctttctttcttt

SEQ ID NO: 59679 - DNA, 22 bp, synthetic construct
  misc_feature 1..22: note = chemically synthesized
  source 1..22: mol_type = other DNA
gccactttctttctttctttct

SEQ ID NO: 59680 - DNA, 22 bp, synthetic construct
  misc_feature 1..22: note = chemically synthesized
  source 1..22: mol_type = other DNA
tctttctttctttcttttgttt

SEQ ID NO: 59681 - DNA, 22 bp, synthetic construct
  misc_feature 1..22: note = chemically synthesized
  source 1..22: mol_type = other DNA
ctttctttctttcttttgtttg

SEQ ID NO: 59682 - DNA, 22 bp, synthetic construct
  misc_feature 1..22: note = chemically synthesized
  source 1..22: mol_type = other DNA
tttctttctttcttttgtttgt

SEQ ID NO: 59683 - DNA, 22 bp, synthetic construct
  misc_feature 1..22: note = chemically synthesized
  source 1..22: mol_type = other DNA
tctttctttcttttgtttgttt

SEQ ID NO: 59684 - DNA, 22 bp, synthetic construct
  misc_feature 1..22: note = chemically synthesized
  source 1..22: mol_type = other DNA
ctttctttcttttgtttgtttg

SEQ ID NO: 59685 - DNA, 22 bp, synthetic construct
  misc_feature 1..22: note = chemically synthesized
  source 1..22: mol_type = other DNA
tttctttcttttgtttgtttgt

SEQ ID NO: 59686 - DNA, 22 bp, synthetic construct
  misc_feature 1..22: note = chemically synthesized
  source 1..22: mol_type = other DNA
tctttcttttgtttgtttgttt

SEQ ID NO: 59687 - DNA, 22 bp, synthetic construct
  misc_feature 1..22: note = chemically synthesized
  source 1..22: mol_type = other DNA
ctttcttttgtttgtttgtttg

SEQ ID NO: 59688 - DNA, 22 bp, synthetic construct
  misc_feature 1..22: note = chemically synthesized
  source 1..22: mol_type = other DNA
tttcttttgtttgtttgtttga

SEQ ID NO: 59689 - DNA, 22 bp, synthetic construct
  misc_feature 1..22: note = chemically synthesized
  source 1..22: mol_type = other DNA
tcttttgtttgtttgtttgaga

SEQ ID NO: 59690 - DNA, 22 bp, synthetic construct
  misc_feature 1..22: note = chemically synthesized
  source 1..22: mol_type = other DNA
cttttgtttgtttgtttgagat

SEQ ID NO: 59691 - DNA, 22 bp, synthetic construct
  misc_feature 1..22: note = chemically synthesized
  source 1..22: mol_type = other DNA
ttttgtttgtttgtttgagatg

SEQ ID NO: 59692 - DNA, 22 bp, synthetic construct
  misc_feature 1..22: note = chemically synthesized
  source 1..22: mol_type = other DNA
ttgtttgtttgtttgagatgga

SEQ ID NO: 59693 - DNA, 22 bp, synthetic construct
  misc_feature 1..22: note = chemically synthesized
  source 1..22: mol_type = other DNA
tgtttgtttgtttgagatggag

SEQ ID NO: 59694 - DNA, 22 bp, synthetic construct
  misc_feature 1..22: note = chemically synthesized
  source 1..22: mol_type = other DNA
gtttgtttgtttgagatggagt

SEQ ID NO: 59695 - DNA, 22 bp, synthetic construct
  misc_feature 1..22: note = chemically synthesized
  source 1..22: mol_type = other DNA
tttgtttgtttgagatggagtc

SEQ ID NO: 59696 - DNA, 22 bp, synthetic construct
  misc_feature 1..22: note = chemically synthesized
  source 1..22: mol_type = other DNA
gtttgtttgagatggagtctcg

SEQ ID NO: 59697 - DNA, 22 bp, synthetic construct
  misc_feature 1..22: note = chemically synthesized
  source 1..22: mol_type = other DNA
tttgtttgagatggagtctcgc

SEQ ID NO: 59698 - DNA, 22 bp, synthetic construct
  misc_feature 1..22: note = chemically synthesized
  source 1..22: mol_type = other DNA
gtttgagatggagtctcgcact

SEQ ID NO: 59699 - DNA, 22 bp, synthetic construct
  misc_feature 1..22: note = chemically synthesized
  source 1..22: mol_type = other DNA
tttgagatggagtctcgcactg

SEQ ID NO: 59700 - DNA, 22 bp, synthetic construct
  misc_feature 1..22: note = chemically synthesized
  source 1..22: mol_type = other DNA
gagatggagtctcgcactgttg

SEQ ID NO: 59701 - DNA, 22 bp, synthetic construct
  misc_feature 1..22: note = chemically synthesized
  source 1..22: mol_type = other DNA
agatggagtctcgcactgttgc

SEQ ID NO: 59702 - DNA, 22 bp, synthetic construct
  misc_feature 1..22: note = chemically synthesized
  source 1..22: mol_type = other DNA
gcactgttgcctggctggagtg

SEQ ID NO: 59703 - DNA, 22 bp, synthetic construct
  misc_feature 1..22: note = chemically synthesized
  source 1..22: mol_type = other DNA
ttgcctggctggagtgcaatgg

SEQ ID NO: 59704 - DNA, 22 bp, synthetic construct
  misc_feature 1..22: note = chemically synthesized
  source 1..22: mol_type = other DNA
cctggctggagtgcaatggtgc

SEQ ID NO: 59705 - DNA, 22 bp, synthetic construct
  misc_feature 1..22: note = chemically synthesized
  source 1..22: mol_type = other DNA
gctggagtgcaatggtgcaatc

SEQ ID NO: 59706 - DNA, 22 bp, synthetic construct
  misc_feature 1..22: note = chemically synthesized
  source 1..22: mol_type = other DNA
gagtgcaatggtgcaatctcag

SEQ ID NO: 59707 - DNA, 22 bp, synthetic construct
  misc_feature 1..22: note = chemically synthesized
  source 1..22: mol_type = other DNA
agctcactgcaacctctgcctc

SEQ ID NO: 59708 - DNA, 22 bp, synthetic construct
  misc_feature 1..22: note = chemically synthesized
  source 1..22: mol_type = other DNA
actgcaacctctgcctctccgg

SEQ ID NO: 59709 - DNA, 22 bp, synthetic construct
  misc_feature 1..22: note = chemically synthesized
  source 1..22: mol_type = other DNA
caacctctgcctctccggttca

SEQ ID NO: 59710 - DNA, 22 bp, synthetic construct
  misc_feature 1..22: note = chemically synthesized
  source 1..22: mol_type = other DNA
tgcctctccggttcaagtgatt

SEQ ID NO: 59711 - DNA, 22 bp, synthetic construct
  misc_feature 1..22: note = chemically synthesized
  source 1..22: mol_type = other DNA
cctctccggttcaagtgattct

SEQ ID NO: 59712 - DNA, 22 bp, synthetic construct
  misc_feature 1..22: note = chemically synthesized
  source 1..22: mol_type = other DNA
tccggttcaagtgattctcctg

SEQ ID NO: 59713 - DNA, 22 bp, synthetic construct
  misc_feature 1..22: note = chemically synthesized
  source 1..22: mol_type = other DNA
cggttcaagtgattctcctgcc

SEQ ID NO: 59714 - DNA, 22 bp, synthetic construct
  misc_feature 1..22: note = chemically synthesized
  source 1..22: mol_type = other DNA
aagtgattctcctgcctcagcc

SEQ ID NO: 59715 - DNA, 22 bp, synthetic construct
  misc_feature 1..22: note = chemically synthesized
  source 1..22: mol_type = other DNA
tcctgcctcagcctcccaagta

SEQ ID NO: 59716 - DNA, 22 bp, synthetic construct
  misc_feature 1..22: note = chemically synthesized
  source 1..22: mol_type = other DNA
ctgcctcagcctcccaagtagc

SEQ ID NO: 59717 - DNA, 22 bp, synthetic construct
  misc_feature 1..22: note = chemically synthesized
  source 1..22: mol_type = other DNA
cctcagcctcccaagtagctgg

SEQ ID NO: 59718 - DNA, 22 bp, synthetic construct
  misc_feature 1..22: note = chemically synthesized
  source 1..22: mol_type = other DNA
agcctcccaagtagctgggatt

SEQ ID NO: 59719 - DNA, 22 bp, synthetic construct
  misc_feature 1..22: note = chemically synthesized
  source 1..22: mol_type = other DNA
ccaagtagctgggattacaggt

SEQ ID NO: 59720 - DNA, 22 bp, synthetic construct
  misc_feature 1..22: note = chemically synthesized
  source 1..22: mol_type = other DNA
ggattacaggtgcccgccacca

SEQ ID NO: 59721 - DNA, 22 bp, synthetic construct
  misc_feature 1..22: note = chemically synthesized
  source 1..22: mol_type = other DNA
caggtgcccgccaccatgccca

SEQ ID NO: 59722 - DNA, 22 bp, synthetic construct
  misc_feature 1..22: note = chemically synthesized
  source 1..22: mol_type = other DNA
attttttttgtatttttagtag

SEQ ID NO: 59723 - DNA, 22 bp, synthetic construct
  misc_feature 1..22: note = chemically synthesized
  source 1..22: mol_type = other DNA
tttttgtatttttagtagagac

SEQ ID NO: 59724 - DNA, 22 bp, synthetic construct
  misc_feature 1..22: note = chemically synthesized
  source 1..22: mol_type = other DNA
ttttgtatttttagtagagaca

SEQ ID NO: 59725 - DNA, 22 bp, synthetic construct
  misc_feature 1..22: note = chemically synthesized
  source 1..22: mol_type = other DNA
tttgtatttttagtagagacat

SEQ ID NO: 59726 - DNA, 22 bp, synthetic construct
  misc_feature 1..22: note = chemically synthesized
  source 1..22: mol_type = other DNA
ttgtatttttagtagagacatg

SEQ ID NO: 59727 - DNA, 22 bp, synthetic construct
  misc_feature 1..22: note = chemically synthesized
  source 1..22: mol_type = other DNA
tgtatttttagtagagacatgg

SEQ ID NO: 59728 - DNA, 22 bp, synthetic construct
  misc_feature 1..22: note = chemically synthesized
  source 1..22: mol_type = other DNA
gtatttttagtagagacatggt

SEQ ID NO: 59729 - DNA, 22 bp, synthetic construct
  misc_feature 1..22: note = chemically synthesized
  source 1..22: mol_type = other DNA
tatttttagtagagacatggtt

SEQ ID NO: 59730 - DNA, 22 bp, synthetic construct
  misc_feature 1..22: note = chemically synthesized
  source 1..22: mol_type = other DNA
ttagtagagacatggtttcact

SEQ ID NO: 59731 - DNA, 22 bp, synthetic construct
  misc_feature 1..22: note = chemically synthesized
  source 1..22: mol_type = other DNA
tagtagagacatggtttcacta

SEQ ID NO: 59732 - DNA, 22 bp, synthetic construct
  misc_feature 1..22: note = chemically synthesized
  source 1..22: mol_type = other DNA
agtagagacatggtttcactat

SEQ ID NO: 59733 - DNA, 22 bp, synthetic construct
  misc_feature 1..22: note = chemically synthesized
  source 1..22: mol_type = other DNA
gtagagacatggtttcactatg

SEQ ID NO: 59734 - DNA, 22 bp, synthetic construct
  misc_feature 1..22: note = chemically synthesized
  source 1..22: mol_type = other DNA
cactatgttgactaggctggtc

SEQ ID NO: 59735 - DNA, 22 bp, synthetic construct
  misc_feature 1..22: note = chemically synthesized
  source 1..22: mol_type = other DNA
actatgttgactaggctggtct

SEQ ID NO: 59736 - DNA, 22 bp, synthetic construct
  misc_feature 1..22: note = chemically synthesized
  source 1..22: mol_type = other DNA
tgttgactaggctggtctcgaa

SEQ ID NO: 59737 - DNA, 22 bp, synthetic construct
  misc_feature 1..22: note = chemically synthesized
  source 1..22: mol_type = other DNA
actaggctggtctcgaactcct

SEQ ID NO: 59738 - DNA, 22 bp, synthetic construct
  misc_feature 1..22: note = chemically synthesized
  source 1..22: mol_type = other DNA
ggctggtctcgaactcctgacc

SEQ ID NO: 59739 - DNA, 22 bp, synthetic construct
  misc_feature 1..22: note = chemically synthesized
  source 1..22: mol_type = other DNA
gtctcgaactcctgacctcatg

SEQ ID NO: 59740 - DNA, 22 bp, synthetic construct
  misc_feature 1..22: note = chemically synthesized
  source 1..22: mol_type = other DNA
gaactcctgacctcatgatctg

SEQ ID NO: 59741 - DNA, 22 bp, synthetic construct
  misc_feature 1..22: note = chemically synthesized
  source 1..22: mol_type = other DNA
ctgacctcatgatctgcctgcc

SEQ ID NO: 59742 - DNA, 22 bp, synthetic construct
  misc_feature 1..22: note = chemically synthesized
  source 1..22: mol_type = other DNA
acctcatgatctgcctgccttg

SEQ ID NO: 59743 - DNA, 22 bp, synthetic construct
  misc_feature 1..22: note = chemically synthesized
  source 1..22: mol_type = other DNA
atgatctgcctgccttggcctc

SEQ ID NO: 59744 - DNA, 22 bp, synthetic construct
  misc_feature 1..22: note = chemically synthesized
  source 1..22: mol_type = other DNA
cctgccttggcctccctaagtg

SEQ ID NO: 59745 - DNA, 22 bp, synthetic construct
  misc_feature 1..22: note = chemically synthesized
  source 1..22: mol_type = other DNA
ccttggcctccctaagtgctag

SEQ ID NO: 59746 - DNA, 22 bp, synthetic construct
  misc_feature 1..22: note = chemically synthesized
  source 1..22: mol_type = other DNA
ggcctccctaagtgctaggatt

SEQ ID NO: 59747 - DNA, 22 bp, synthetic construct
  misc_feature 1..22: note = chemically synthesized
  source 1..22: mol_type = other DNA
gcctccctaagtgctaggatta

SEQ ID NO: 59748 - DNA, 22 bp, synthetic construct
  misc_feature 1..22: note = chemically synthesized
  source 1..22: mol_type = other DNA
cctaagtgctaggattacaggc

SEQ ID NO: 59749 - DNA, 22 bp, synthetic construct
  misc_feature 1..22: note = chemically synthesized
  source 1..22: mol_type = other DNA
agtgctaggattacaggcgtga

SEQ ID NO: 59750 - DNA, 22 bp, synthetic construct
  misc_feature 1..22: note = chemically synthesized
  source 1..22: mol_type = other DNA
ggattacaggcgtgagccacta

SEQ ID NO: 59751 - DNA, 22 bp, synthetic construct
  misc_feature 1..22: note = chemically synthesized
  source 1..22: mol_type = other DNA
caggcgtgagccactacaccca

SEQ ID NO: 59752 - DNA, 22 bp, synthetic construct
  misc_feature 1..22: note = chemically synthesized
  source 1..22: mol_type = other DNA
cacccagccgcatgattctaaa

SEQ ID NO: 59753 - DNA, 22 bp, synthetic construct
  misc_feature 1..22: note = chemically synthesized
  source 1..22: mol_type = other DNA
taaaaaataaaaagatgaagtg

SEQ ID NO: 59754 - DNA, 22 bp, synthetic construct
  misc_feature 1..22: note = chemically synthesized
  source 1..22: mol_type = other DNA
aaaaataaaaagatgaagtgtt

SEQ ID NO: 59755 - DNA, 22 bp, synthetic construct
  misc_feature 1..22: note = chemically synthesized
  source 1..22: mol_type = other DNA
ttccaaacatctgatctccatt

SEQ ID NO: 59756 - DNA, 22 bp, synthetic construct
  misc_feature 1..22: note = chemically synthesized
  source 1..22: mol_type = other DNA
caaacatctgatctccattgaa

SEQ ID NO: 59757 - DNA, 22 bp, synthetic construct
  misc_feature 1..22: note = chemically synthesized
  source 1..22: mol_type = other DNA
atctccattgaagaaccatgca

SEQ ID NO: 59758 - DNA, 22 bp, synthetic construct
  misc_feature 1..22: note = chemically synthesized
  source 1..22: mol_type = other DNA
cattgaagaaccatgcaatctc

SEQ ID NO: 59759 - DNA, 22 bp, synthetic construct
  misc_feature 1..22: note = chemically synthesized
  source 1..22: mol_type = other DNA
aagaaccatgcaatctctctgg

SEQ ID NO: 59760 - DNA, 22 bp, synthetic construct
  misc_feature 1..22: note = chemically synthesized
  source 1..22: mol_type = other DNA
tctgggttgatagaggccagag

SEQ ID NO: 59761 - DNA, 22 bp, synthetic construct
  misc_feature 1..22: note = chemically synthesized
  source 1..22: mol_type = other DNA
tgggttgatagaggccagagtt

SEQ ID NO: 59762 - DNA, 22 bp, synthetic construct
  misc_feature 1..22: note = chemically synthesized
  source 1..22: mol_type = other DNA
ggttgatagaggccagagttag

SEQ ID NO: 59763 - DNA, 22 bp, synthetic construct
  misc_feature 1..22: note = chemically synthesized
  source 1..22: mol_type = other DNA
atagaggccagagttagtggct

SEQ ID NO: 59764 - DNA, 22 bp, synthetic construct
  misc_feature 1..22: note = chemically synthesized
  source 1..22: mol_type = other DNA
gtggctctccctgatttcggtg

SEQ ID NO: 59765 - DNA, 22 bp, synthetic construct
  misc_feature 1..22: note = chemically synthesized
  source 1..22: mol_type = other DNA
tccctgatttcggtgagaaatc

SEQ ID NO: 59766 - DNA, 22 bp, synthetic construct
  misc_feature 1..22: note = chemically synthesized
  source 1..22: mol_type = other DNA
cctgatttcggtgagaaatcac

SEQ ID NO: 59767 - DNA, 22 bp, synthetic construct
  misc_feature 1..22: note = chemically synthesized
  source 1..22: mol_type = other DNA
atttcggtgagaaatcactatt

SEQ ID NO: 59768 - DNA, 22 bp, synthetic construct
  misc_feature 1..22: note = chemically synthesized
  source 1..22: mol_type = other DNA
cggtgagaaatcactattccac

SEQ ID NO: 59769 - DNA, 22 bp, synthetic construct
  misc_feature 1..22: note = chemically synthesized
  source 1..22: mol_type = other DNA
ggtgagaaatcactattccacc

SEQ ID NO: 59770 - DNA, 22 bp, synthetic construct
  misc_feature 1..22: note = chemically synthesized
  source 1..22: mol_type = other DNA
ttccaccatcacgggataaaag

SEQ ID NO: 59771 - DNA, 22 bp, synthetic construct
  misc_feature 1..22: note = chemically synthesized
  source 1..22: mol_type = other DNA
caccatcacgggataaaaggca

SEQ ID NO: 59772 - DNA, 22 bp, synthetic construct
  misc_feature 1..22: note = chemically synthesized
  source 1..22: mol_type = other DNA
actggcggttgacacctatttc

SEQ ID NO: 59773 - DNA, 22 bp, synthetic construct
  misc_feature 1..22: note = chemically synthesized
  source 1..22: mol_type = other DNA
gcggttgacacctatttccaca

SEQ ID NO: 59774 - DNA, 22 bp, synthetic construct
  misc_feature 1..22: note = chemically synthesized
  source 1..22: mol_type = other DNA
acacctatttccacagtgaaag

SEQ ID NO: 59775 - DNA, 22 bp, synthetic construct
  misc_feature 1..22: note = chemically synthesized
  source 1..22: mol_type = other DNA
tttccacagtgaaagatatatc

SEQ ID NO: 59776 - DNA, 22 bp, synthetic construct
  misc_feature 1..22: note = chemically synthesized
  source 1..22: mol_type = other DNA
ccacagtgaaagatatatctag

SEQ ID NO: 59777 - DNA, 22 bp, synthetic construct
  misc_feature 1..22: note = chemically synthesized
  source 1..22: mol_type = other DNA
cacagtgaaagatatatctagt

SEQ ID NO: 59778 - DNA, 22 bp, synthetic construct
  misc_feature 1..22: note = chemically synthesized
  source 1..22: mol_type = other DNA
gtacttttaaaggggaagtggt

SEQ ID NO: 59779 - DNA, 22 bp, synthetic construct
  misc_feature 1..22: note = chemically synthesized
  source 1..22: mol_type = other DNA
ttaaaggggaagtggtttgtct

SEQ ID NO: 59780 - DNA, 22 bp, synthetic construct
  misc_feature 1..22: note = chemically synthesized
  source 1..22: mol_type = other DNA
taaaggggaagtggtttgtctg

SEQ ID NO: 59781 - DNA, 22 bp, synthetic construct
  misc_feature 1..22: note = chemically synthesized
  source 1..22: mol_type = other DNA
aaaggggaagtggtttgtctga

SEQ ID NO: 59782 - DNA, 22 bp, synthetic construct
  misc_feature 1..22: note = chemically synthesized
  source 1..22: mol_type = other DNA
aaggggaagtggtttgtctgag

SEQ ID NO: 59783 - DNA, 22 bp, synthetic construct
  misc_feature 1..22: note = chemically synthesized
  source 1..22: mol_type = other DNA
gtctgagatactctgtttcaaa

SEQ ID NO: 59784 - DNA, 22 bp, synthetic construct
  misc_feature 1..22: note = chemically synthesized
  source 1..22: mol_type = other DNA
tctgagatactctgtttcaaag

SEQ ID NO: 59785 - DNA, 22 bp, synthetic construct
  misc_feature 1..22: note = chemically synthesized
  source 1..22: mol_type = other DNA
agatactctgtttcaaagtaga

SEQ ID NO: 59786 - DNA, 22 bp, synthetic construct
  misc_feature 1..22: note = chemically synthesized
  source 1..22: mol_type = other DNA
tgtttcaaagtagagaggatac

SEQ ID NO: 59787 - DNA, 22 bp, synthetic construct
  misc_feature 1..22: note = chemically synthesized
  source 1..22: mol_type = other DNA
tttcaaagtagagaggatacag

SEQ ID NO: 59788 - DNA, 22 bp, synthetic construct
  misc_feature 1..22: note = chemically synthesized
  source 1..22: mol_type = other DNA
caaagtagagaggatacagaac

SEQ ID NO: 59789 - DNA, 22 bp, synthetic construct
  misc_feature 1..22: note = chemically synthesized
  source 1..22: mol_type = other DNA
aaagtagagaggatacagaaca

SEQ ID NO: 59790 - DNA, 22 bp, synthetic construct
  misc_feature 1..22: note = chemically synthesized
  source 1..22: mol_type = other DNA
aagctatatacatccttacaga

SEQ ID NO: 59791 - DNA, 22 bp, synthetic construct
  misc_feature 1..22: note = chemically synthesized
  source 1..22: mol_type = other DNA
tatacatccttacagagagcaa

SEQ ID NO: 59792 - DNA, 22 bp, synthetic construct
  misc_feature 1..22: note = chemically synthesized
  source 1..22: mol_type = other DNA
acagagagcaattctgatggaa

SEQ ID NO: 59793 - DNA, 22 bp, synthetic construct
  misc_feature 1..22: note = chemically synthesized
  source 1..22: mol_type = other DNA
cagagagcaattctgatggaaa

SEQ ID NO: 59794 - DNA, 22 bp, synthetic construct
  misc_feature 1..22: note = chemically synthesized
  source 1..22: mol_type = other DNA
tgatggaaatgcaggccatgtt

SEQ ID NO: 59795 - DNA, 22 bp, synthetic construct
  misc_feature 1..22: note = chemically synthesized
  source 1..22: mol_type = other DNA
atggaaatgcaggccatgtttc

SEQ ID NO: 59796 - DNA, 22 bp, synthetic construct
  misc_feature 1..22: note = chemically synthesized
  source 1..22: mol_type = other DNA
ccctggggggggctcgtcctag

SEQ ID NO: 59797 - DNA, 22 bp, synthetic construct
  misc_feature 1..22: note = chemically synthesized
  source 1..22: mol_type = other DNA
cctggggggggctcgtcctagg

SEQ ID NO: 59798 - DNA, 22 bp, synthetic construct
  misc_feature 1..22: note = chemically synthesized
  source 1..22: mol_type = other DNA
gggggggctcgtcctaggggct

SEQ ID NO: 59799 - DNA, 22 bp, synthetic construct
  misc_feature 1..22: note = chemically synthesized
  source 1..22: mol_type = other DNA
gtcctaggggctggagtgcatt

SEQ ID NO: 59800 - DNA, 22 bp, synthetic construct
  misc_feature 1..22: note = chemically synthesized
  source 1..22: mol_type = other DNA
ggggctggagtgcattctctga

SEQ ID NO: 59801 - DNA, 22 bp, synthetic construct
  misc_feature 1..22: note = chemically synthesized
  source 1..22: mol_type = other DNA
gagtgcattctctgatgtcaga

SEQ ID NO: 59802 - DNA, 22 bp, synthetic construct
  misc_feature 1..22: note = chemically synthesized
  source 1..22: mol_type = other DNA
tctgatgtcagaggaaatgcaa

SEQ ID NO: 59803 - DNA, 22 bp, synthetic construct
  misc_feature 1..22: note = chemically synthesized
  source 1..22: mol_type = other DNA
tgatgtcagaggaaatgcaaga

SEQ ID NO: 59804 - DNA, 22 bp, synthetic construct
  misc_feature 1..22: note = chemically synthesized
  source 1..22: mol_type = other DNA
atgtcagaggaaatgcaagatt

SEQ ID NO: 59805 - DNA, 22 bp, synthetic construct
  misc_feature 1..22: note = chemically synthesized
  source 1..22: mol_type = other DNA
cctgaggcctgagggaacccat

SEQ ID NO: 59806 - DNA, 22 bp, synthetic construct
  misc_feature 1..22: note = chemically synthesized
  source 1..22: mol_type = other DNA
aggcctgagggaacccatggta

SEQ ID NO: 59807 - DNA, 22 bp, synthetic construct
  misc_feature 1..22: note = chemically synthesized
  source 1..22: mol_type = other DNA
agggaacccatggtatatgcaa

SEQ ID NO: 59808 - DNA, 22 bp, synthetic construct
  misc_feature 1..22: note = chemically synthesized
  source 1..22: mol_type = other DNA
caaactgtagttccatatgcat

SEQ ID NO: 59809 - DNA, 22 bp, synthetic construct
  misc_feature 1..22: note = chemically synthesized
  source 1..22: mol_type = other DNA
aaactgtagttccatatgcatt

SEQ ID NO: 59810 - DNA, 22 bp, synthetic construct
  misc_feature 1..22: note = chemically synthesized
  source 1..22: mol_type = other DNA
tagttccatatgcattcttcca

SEQ ID NO: 59811 - DNA, 22 bp, synthetic construct
  misc_feature 1..22: note = chemically synthesized
  source 1..22: mol_type = other DNA
catatgcattcttccaggacaa

SEQ ID NO: 59812 - DNA, 22 bp, synthetic construct
  misc_feature 1..22: note = chemically synthesized
  source 1..22: mol_type = other DNA
ttccaggacaaatacttcttga

SEQ ID NO: 59813 - DNA, 22 bp, synthetic construct
  misc_feature 1..22: note = chemically synthesized
  source 1..22: mol_type = other DNA
ccaggacaaatacttcttgagg

SEQ ID NO: 59814 - DNA, 22 bp, synthetic construct
  misc_feature 1..22: note = chemically synthesized
  source 1..22: mol_type = other DNA
caggacaaatacttcttgaggt

SEQ ID NO: 59815 - DNA, 22 bp, synthetic construct
  misc_feature 1..22: note = chemically synthesized
  source 1..22: mol_type = other DNA
cttgaggttaaaaaaaaaaagt

SEQ ID NO: 59816 - DNA, 22 bp, synthetic construct
  misc_feature 1..22: note = chemically synthesized
  source 1..22: mol_type = other DNA
ttgaggttaaaaaaaaaaagtc

SEQ ID NO: 59817 - DNA, 22 bp, synthetic construct
  misc_feature 1..22: note = chemically synthesized
  source 1..22: mol_type = other DNA
gaggttaaaaaaaaaaagtcac

SEQ ID NO: 59818 - DNA, 22 bp, synthetic construct
  misc_feature 1..22: note = chemically synthesized
  source 1..22: mol_type = other DNA
aggttaaaaaaaaaaagtcaca

SEQ ID NO: 59819 - DNA, 22 bp, synthetic construct
  misc_feature 1..22: note = chemically synthesized
  source 1..22: mol_type = other DNA
aaaaaaaaaagtcacatagctg

SEQ ID NO: 59820 - DNA, 22 bp, synthetic construct
  misc_feature 1..22: note = chemically synthesized
  source 1..22: mol_type = other DNA
ccattttatggatttcaggatt

SEQ ID NO: 59821 - DNA, 22 bp, synthetic construct
  misc_feature 1..22: note = chemically synthesized
  source 1..22: mol_type = other DNA
tatggatttcaggatttttttt

SEQ ID NO: 59822 - DNA, 22 bp, synthetic construct
  misc_feature 1..22: note = chemically synthesized
  source 1..22: mol_type = other DNA
atggatttcaggattttttttt

SEQ ID NO: 59823 - DNA, 22 bp, synthetic construct
  misc_feature 1..22: note = chemically synthesized
  source 1..22: mol_type = other DNA
tggatttcaggatttttttttt

SEQ ID NO: 59824 - DNA, 22 bp, synthetic construct
  misc_feature 1..22: note = chemically synthesized
  source 1..22: mol_type = other DNA
caggattttttttttttttttt

SEQ ID NO: 59825 - DNA, 22 bp, synthetic construct
  misc_feature 1..22: note = chemically synthesized
  source 1..22: mol_type = other DNA
aggatttttttttttttttttt

SEQ ID NO: 59826 - DNA, 22 bp, synthetic construct
  misc_feature 1..22: note = chemically synthesized
  source 1..22: mol_type = other DNA
ttttttttttttttttgagatg

SEQ ID NO: 59827 - DNA, 22 bp, synthetic construct
  misc_feature 1..22: note = chemically synthesized
  source 1..22: mol_type = other DNA
tttttttttttttttgagatgg

SEQ ID NO: 59828 - DNA, 22 bp, synthetic construct
  misc_feature 1..22: note = chemically synthesized
  source 1..22: mol_type = other DNA
ttttttttttttttgagatgga

SEQ ID NO: 59829 - DNA, 22 bp, synthetic construct
  misc_feature 1..22: note = chemically synthesized
  source 1..22: mol_type = other DNA
tttttttttttttgagatggag

SEQ ID NO: 59830 - DNA, 22 bp, synthetic construct
  misc_feature 1..22: note = chemically synthesized
  source 1..22: mol_type = other DNA
ttttttttttttgagatggagt

SEQ ID NO: 59831 - DNA, 22 bp, synthetic construct
  misc_feature 1..22: note = chemically synthesized
  source 1..22: mol_type = other DNA
tttttttttttgagatggagtc

SEQ ID NO: 59832 - DNA, 22 bp, synthetic construct
  misc_feature 1..22: note = chemically synthesized
  source 1..22: mol_type = other DNA
ttttttttttgagatggagtct

SEQ ID NO: 59833 - DNA, 22 bp, synthetic construct
  misc_feature 1..22: note = chemically synthesized
  source 1..22: mol_type = other DNA
tttttttttgagatggagtctt

SEQ ID NO: 59834 - DNA, 22 bp, synthetic construct
  misc_feature 1..22: note = chemically synthesized
  source 1..22: mol_type = other DNA
ttttttttgagatggagtcttg

SEQ ID NO: 59835 - DNA, 22 bp, synthetic construct
  misc_feature 1..22: note = chemically synthesized
  source 1..22: mol_type = other DNA
tttttttgagatggagtcttgc

SEQ ID NO: 59836 - DNA, 22 bp, synthetic construct
  misc_feature 1..22: note = chemically synthesized
  source 1..22: mol_type = other DNA
ttttttgagatggagtcttgct

SEQ ID NO: 59837 - DNA, 22 bp, synthetic construct
  misc_feature 1..22: note = chemically synthesized
  source 1..22: mol_type = other DNA
tttttgagatggagtcttgctc

SEQ ID NO: 59838 - DNA, 22 bp, synthetic construct
  misc_feature 1..22: note = chemically synthesized
  source 1..22: mol_type = other DNA
ttttgagatggagtcttgctct

SEQ ID NO: 59839 - DNA, 22 bp, synthetic construct
  misc_feature 1..22: note = chemically synthesized
  source 1..22: mol_type = other DNA
tttgagatggagtcttgctctg

SEQ ID NO: 59840 - DNA, 22 bp, synthetic construct
  misc_feature 1..22: note = chemically synthesized
  source 1..22: mol_type = other DNA
ttgagatggagtcttgctctgt

SEQ ID NO: 59841 - DNA, 22 bp, synthetic construct
  misc_feature 1..22: note = chemically synthesized
  source 1..22: mol_type = other DNA
tgagatggagtcttgctctgtc

SEQ ID NO: 59842 - DNA, 22 bp, synthetic construct
  misc_feature 1..22: note = chemically synthesized
  source 1..22: mol_type = other DNA
gagatggagtcttgctctgtca

SEQ ID NO: 59843 - DNA, 22 bp, synthetic construct
  misc_feature 1..22: note = chemically synthesized
  source 1..22: mol_type = other DNA
agatggagtcttgctctgtcac

SEQ ID NO: 59844 - DNA, 22 bp, synthetic construct
  misc_feature 1..22: note = chemically synthesized
  source 1..22: mol_type = other DNA
gctctgtcacccagcctgtagt

SEQ ID NO: 59845 - DNA, 22 bp, synthetic construct
  misc_feature 1..22: note = chemically synthesized
  source 1..22: mol_type = other DNA
ctctgtcacccagcctgtagtg

SEQ ID NO: 59846 - DNA, 22 bp, synthetic construct
  misc_feature 1..22: note = chemically synthesized
  source 1..22: mol_type = other DNA
tgtcacccagcctgtagtgcag

SEQ ID NO: 59847 - DNA, 22 bp, synthetic construct
  misc_feature 1..22: note = chemically synthesized
  source 1..22: mol_type = other DNA
tcacccagcctgtagtgcagtg

SEQ ID NO: 59848 - DNA, 22 bp, synthetic construct
  misc_feature 1..22: note = chemically synthesized
  source 1..22: mol_type = other DNA
tagtgcagtggcataatctcgg

SEQ ID NO: 59849 - DNA, 22 bp, synthetic construct
  misc_feature 1..22: note = chemically synthesized
  source 1..22: mol_type = other DNA
ggctcacggcaacctccgcctc

SEQ ID NO: 59850 - DNA, 22 bp, synthetic construct
  misc_feature 1..22: note = chemically synthesized
  source 1..22: mol_type = other DNA
acggcaacctccgcctcccagg

SEQ ID NO: 59851 - DNA, 22 bp, synthetic construct
  misc_feature 1..22: note = chemically synthesized
  source 1..22: mol_type = other DNA
cgcctcccaggttcaagcgatt

SEQ ID NO: 59852 - DNA, 22 bp, synthetic construct
  misc_feature 1..22: note = chemically synthesized
  source 1..22: mol_type = other DNA
ccaggttcaagcgattctcttg

SEQ ID NO: 59853 - DNA, 22 bp, synthetic construct
  misc_feature 1..22: note = chemically synthesized
  source 1..22: mol_type = other DNA
aagcgattctcttgccttagcc

SEQ ID NO: 59854 - DNA, 22 bp, synthetic construct
  misc_feature 1..22: note = chemically synthesized
  source 1..22: mol_type = other DNA
tcttgccttagcctcccgagta

SEQ ID NO: 59855 - DNA, 22 bp, synthetic construct
  misc_feature 1..22: note = chemically synthesized
  source 1..22: mol_type = other DNA
ttgccttagcctcccgagtagc

SEQ ID NO: 59856 - DNA, 22 bp, synthetic construct
  misc_feature 1..22: note = chemically synthesized
  source 1..22: mol_type = other DNA
gccttagcctcccgagtagctg

SEQ ID NO: 59857 - DNA, 22 bp, synthetic construct
  misc_feature 1..22: note = chemically synthesized
  source 1..22: mol_type = other DNA
ccttagcctcccgagtagctgg

SEQ ID NO: 59858 - DNA, 22 bp, synthetic construct
  misc_feature 1..22: note = chemically synthesized
  source 1..22: mol_type = other DNA
agcctcccgagtagctgggatt

SEQ ID NO: 59859 - DNA, 22 bp, synthetic construct
  misc_feature 1..22: note = chemically synthesized
  source 1..22: mol_type = other DNA
gcctcccgagtagctgggatta

SEQ ID NO: 59860 - DNA, 22 bp, synthetic construct
  misc_feature 1..22: note = chemically synthesized
  source 1..22: mol_type = other DNA
ccgagtagctgggattacagtc

SEQ ID NO: 59861 - DNA, 22 bp, synthetic construct
  misc_feature 1..22: note = chemically synthesized
  source 1..22: mol_type = other DNA
ggattacagtcacgcaccacca

SEQ ID NO: 59862 - DNA, 22 bp, synthetic construct
  misc_feature 1..22: note = chemically synthesized
  source 1..22: mol_type = other DNA
cagtcacgcaccaccacatctg

SEQ ID NO: 59863 - DNA, 22 bp, synthetic construct
  misc_feature 1..22: note = chemically synthesized
  source 1..22: mol_type = other DNA
gctaattctttatattttttgg

SEQ ID NO: 59864 - DNA, 22 bp, synthetic construct
  misc_feature 1..22: note = chemically synthesized
  source 1..22: mol_type = other DNA
attctttatattttttggtaga

SEQ ID NO: 59865 - DNA, 22 bp, synthetic construct
  misc_feature 1..22: note = chemically synthesized
  source 1..22: mol_type = other DNA
tttatattttttggtagaaacg

SEQ ID NO: 59866 - DNA, 22 bp, synthetic construct
  misc_feature 1..22: note = chemically synthesized
  source 1..22: mol_type = other DNA
tatattttttggtagaaacggt

SEQ ID NO: 59867 - DNA, 22 bp, synthetic construct
  misc_feature 1..22: note = chemically synthesized
  source 1..22: mol_type = other DNA
atattttttggtagaaacggtg

SEQ ID NO: 59868 - DNA, 22 bp, synthetic construct
  misc_feature 1..22: note = chemically synthesized
  source 1..22: mol_type = other DNA
tattttttggtagaaacggtgt

SEQ ID NO: 59869 - DNA, 22 bp, synthetic construct
  misc_feature 1..22: note = chemically synthesized
  source 1..22: mol_type = other DNA
tttggtagaaacggtgtttcac

SEQ ID NO: 59870 - DNA, 22 bp, synthetic construct
  misc_feature 1..22: note = chemically synthesized
  source 1..22: mol_type = other DNA
ttggtagaaacggtgtttcacc

SEQ ID NO: 59871 - DNA, 22 bp, synthetic construct
  misc_feature 1..22: note = chemically synthesized
  source 1..22: mol_type = other DNA
tggtagaaacggtgtttcacca

SEQ ID NO: 59872 - DNA, 22 bp, synthetic construct
  misc_feature 1..22: note = chemically synthesized
  source 1..22: mol_type = other DNA
ggtagaaacggtgtttcaccat

SEQ ID NO: 59873 - DNA, 22 bp, synthetic construct
  misc_feature 1..22: note = chemically synthesized
  source 1..22: mol_type = other DNA
gtagaaacggtgtttcaccatg

SEQ ID NO: 59874 - DNA, 22 bp, synthetic construct
  misc_feature 1..22: note = chemically synthesized
  source 1..22: mol_type = other DNA
caccatgttggccaggctggtc

SEQ ID NO: 59875 - DNA, 22 bp, synthetic construct
  misc_feature 1..22: note = chemically synthesized
  source 1..22: mol_type = other DNA
accatgttggccaggctggtct

SEQ ID NO: 59876 - DNA, 22 bp, synthetic construct
  misc_feature 1..22: note = chemically synthesized
  source 1..22: mol_type = other DNA
gccaggctggtctcaaactcct

SEQ ID NO: 59877 - DNA, 22 bp, synthetic construct
  misc_feature 1..22: note = chemically synthesized
  source 1..22: mol_type = other DNA
gtctcaaactcctgacctcatg

SEQ ID NO: 59878 - DNA, 22 bp, synthetic construct
  misc_feature 1..22: note = chemically synthesized
  source 1..22: mol_type = other DNA
aaactcctgacctcatgtgatc

SEQ ID NO: 59879 - DNA, 22 bp, synthetic construct
  misc_feature 1..22: note = chemically synthesized
  source 1..22: mol_type = other DNA
ctgacctcatgtgatctgcctg

SEQ ID NO: 59880 - DNA, 22 bp, synthetic construct
  misc_feature 1..22: note = chemically synthesized
  source 1..22: mol_type = other DNA
acctcatgtgatctgcctgcct

SEQ ID NO: 59881 - DNA, 22 bp, synthetic construct
  misc_feature 1..22: note = chemically synthesized
  source 1..22: mol_type = other DNA
atgtgatctgcctgccttggcc

SEQ ID NO: 59882 - DNA, 22 bp, synthetic construct
  misc_feature 1..22: note = chemically synthesized
  source 1..22: mol_type = other DNA
cctgccttggcctcccaaagtg

SEQ ID NO: 59883 - DNA, 22 bp, synthetic construct
  misc_feature 1..22: note = chemically synthesized
  source 1..22: mol_type = other DNA
ccttggcctcccaaagtgctga

SEQ ID NO: 59884 - DNA, 22 bp, synthetic construct
  misc_feature 1..22: note = chemically synthesized
  source 1..22: mol_type = other DNA
ggcctcccaaagtgctgagatt

SEQ ID NO: 59885 - DNA, 22 bp, synthetic construct
  misc_feature 1..22: note = chemically synthesized
  source 1..22: mol_type = other DNA
gcctcccaaagtgctgagatta

SEQ ID NO: 59886 - DNA, 22 bp, synthetic construct
  misc_feature 1..22: note = chemically synthesized
  source 1..22: mol_type = other DNA
ccaaagtgctgagattacaggt

SEQ ID NO: 59887 - DNA, 22 bp, synthetic construct
  misc_feature 1..22: note = chemically synthesized
  source 1..22: mol_type = other DNA
agattacaggtgtgagccaccg

SEQ ID NO: 59888 - DNA, 22 bp, synthetic construct
  misc_feature 1..22: note = chemically synthesized
  source 1..22: mol_type = other DNA
caggtgtgagccaccgcgcctg

SEQ ID NO: 59889 - DNA, 22 bp, synthetic construct
  misc_feature 1..22: note = chemically synthesized
  source 1..22: mol_type = other DNA
cctggagttcagaatcttgggc

SEQ ID NO: 59890 - DNA, 22 bp, synthetic construct
  misc_feature 1..22: note = chemically synthesized
  source 1..22: mol_type = other DNA
gagttcagaatcttgggcttca

SEQ ID NO: 59891 - DNA, 22 bp, synthetic construct
  misc_feature 1..22: note = chemically synthesized
  source 1..22: mol_type = other DNA
agaatcttgggcttcattattt

SEQ ID NO: 59892 - DNA, 22 bp, synthetic construct
  misc_feature 1..22: note = chemically synthesized
  source 1..22: mol_type = other DNA
gggcttcattatttgtgtttaa

SEQ ID NO: 59893 - DNA, 22 bp, synthetic construct
  misc_feature 1..22: note = chemically synthesized
  source 1..22: mol_type = other DNA
ggcttcattatttgtgtttaaa

SEQ ID NO: 59894 - DNA, 22 bp, synthetic construct
  misc_feature 1..22: note = chemically synthesized
  source 1..22: mol_type = other DNA
cattatttgtgtttaaatagat

SEQ ID NO: 59895 - DNA, 22 bp, synthetic construct
  misc_feature 1..22: note = chemically synthesized
  source 1..22: mol_type = other DNA
attatttgtgtttaaatagatc

SEQ ID NO: 59896 - DNA, 22 bp, synthetic construct
  misc_feature 1..22: note = chemically synthesized
  source 1..22: mol_type = other DNA
tttgtgtttaaatagatcatac

SEQ ID NO: 59897 - DNA, 22 bp, synthetic construct
  misc_feature 1..22: note = chemically synthesized
  source 1..22: mol_type = other DNA
gtgtttaaatagatcatacagt

SEQ ID NO: 59898 - DNA, 22 bp, synthetic construct
  misc_feature 1..22: note = chemically synthesized
  source 1..22: mol_type = other DNA
tgtttaaatagatcatacagtc

SEQ ID NO: 59899 - DNA, 22 bp, synthetic construct
  misc_feature 1..22: note = chemically synthesized
  source 1..22: mol_type = other DNA
aaatagatcatacagtcaggca

SEQ ID NO: 59900 - DNA, 22 bp, synthetic construct
  misc_feature 1..22: note = chemically synthesized
  source 1..22: mol_type = other DNA
aatagatcatacagtcaggcac

SEQ ID NO: 59901 - DNA, 22 bp, synthetic construct
  misc_feature 1..22: note = chemically synthesized
  source 1..22: mol_type = other DNA
atgcctgtaatcccagcacttt

SEQ ID NO: 59902 - DNA, 22 bp, synthetic construct
  misc_feature 1..22: note = chemically synthesized
  source 1..22: mol_type = other DNA
taatcccagcactttgggaggc

SEQ ID NO: 59903 - DNA, 22 bp, synthetic construct
  misc_feature 1..22: note = chemically synthesized
  source 1..22: mol_type = other DNA
tgggaggctgaggtgggaggat

SEQ ID NO: 59904 - DNA, 22 bp, synthetic construct
  misc_feature 1..22: note = chemically synthesized
  source 1..22: mol_type = other DNA
gggaggctgaggtgggaggatt

SEQ ID NO: 59905 - DNA, 22 bp, synthetic construct
  misc_feature 1..22: note = chemically synthesized
  source 1..22: mol_type = other DNA
ggaggctgaggtgggaggattg

SEQ ID NO: 59906 - DNA, 22 bp, synthetic construct
  misc_feature 1..22: note = chemically synthesized
  source 1..22: mol_type = other DNA
aggtgggaggattgcctgagtt

SEQ ID NO: 59907 - DNA, 22 bp, synthetic construct
  misc_feature 1..22: note = chemically synthesized
  source 1..22: mol_type = other DNA
cctgagttcaggagatggagac

SEQ ID NO: 59908 - DNA, 22 bp, synthetic construct
  misc_feature 1..22: note = chemically synthesized
  source 1..22: mol_type = other DNA
agttcaggagatggagaccagc

SEQ ID NO: 59909 - DNA, 22 bp, synthetic construct
  misc_feature 1..22: note = chemically synthesized
  source 1..22: mol_type = other DNA
aggagatggagaccagcctggg

SEQ ID NO: 59910 - DNA, 22 bp, synthetic construct
  misc_feature 1..22: note = chemically synthesized
  source 1..22: mol_type = other DNA
ggcaacatggtgaaaccccgtc

SEQ ID NO: 59911 - DNA, 22 bp, synthetic construct
  misc_feature 1..22: note = chemically synthesized
  source 1..22: mol_type = other DNA
tactaaaaatacaaaaactagc

SEQ ID NO: 59912 - DNA, 22 bp, synthetic construct
  misc_feature 1..22: note = chemically synthesized
  source 1..22: mol_type = other DNA
ctaaaaatacaaaaactagctg

SEQ ID NO: 59913 - DNA, 22 bp, synthetic construct
  misc_feature 1..22: note = chemically synthesized
  source 1..22: mol_type = other DNA
aaaatacaaaaactagctggat

SEQ ID NO: 59914 - DNA, 22 bp, synthetic construct
  misc_feature 1..22: note = chemically synthesized
  source 1..22: mol_type = other DNA
gctggatgtggtggcacacacc

SEQ ID NO: 59915 - DNA, 22 bp, synthetic construct
  misc_feature 1..22: note = chemically synthesized
  source 1..22: mol_type = other DNA
gatgtggtggcacacacctgta

SEQ ID NO: 59916 - DNA, 22 bp, synthetic construct
  misc_feature 1..22: note = chemically synthesized
  source 1..22: mol_type = other DNA
tagtcccagctattcaggaggc

SEQ ID NO: 59917 - DNA, 22 bp, synthetic construct
  misc_feature 1..22: note = chemically synthesized
  source 1..22: mol_type = other DNA
ttcaggaggctgaggtgggagg

SEQ ID NO: 59918 - DNA, 22 bp, synthetic construct
  misc_feature 1..22: note = chemically synthesized
  source 1..22: mol_type = other DNA
aggaggctgaggtgggaggatc

SEQ ID NO: 59919 - DNA, 22 bp, synthetic construct
  misc_feature 1..22: note = chemically synthesized
  source 1..22: mol_type = other DNA
aggtgggaggatcccaggaggt

SEQ ID NO: 59920 - DNA, 22 bp, synthetic construct
  misc_feature 1..22: note = chemically synthesized
  source 1..22: mol_type = other DNA
cgccactgcactccaggctggg

SEQ ID NO: 59921 - DNA, 22 bp, synthetic construct
  misc_feature 1..22: note = chemically synthesized
  source 1..22: mol_type = other DNA
cactccaggctgggttactgag

SEQ ID NO: 59922 - DNA, 22 bp, synthetic construct
  misc_feature 1..22: note = chemically synthesized
  source 1..22: mol_type = other DNA
caggctgggttactgagccaga

SEQ ID NO: 59923 - DNA, 22 bp, synthetic construct
  misc_feature 1..22: note = chemically synthesized
  source 1..22: mol_type = other DNA
ggttactgagccagatcctgtc

SEQ ID NO: 59924 - DNA, 22 bp, synthetic construct
  misc_feature 1..22: note = chemically synthesized
  source 1..22: mol_type = other DNA
ctgagccagatcctgtctcaaa

SEQ ID NO: 59925 - DNA, 22 bp, synthetic construct
  misc_feature 1..22: note = chemically synthesized
  source 1..22: mol_type = other DNA
agccagatcctgtctcaaaaaa

SEQ ID NO: 59926 - DNA, 22 bp, synthetic construct
  misc_feature 1..22: note = chemically synthesized
  source 1..22: mol_type = other DNA
tctcaaaaaaaaaaaagataat

SEQ ID NO: 59927 - DNA, 22 bp, synthetic construct
  misc_feature 1..22: note = chemically synthesized
  source 1..22: mol_type = other DNA
aaaaaaaaaaaagataatacat

SEQ ID NO: 59928 - DNA, 22 bp, synthetic construct
  misc_feature 1..22: note = chemically synthesized
  source 1..22: mol_type = other DNA
aaacagttcaaaatgcaaaagt

SEQ ID NO: 59929 - DNA, 22 bp, synthetic construct
  misc_feature 1..22: note = chemically synthesized
  source 1..22: mol_type = other DNA
aaaatgcaaaagttacatacat

SEQ ID NO: 59930 - DNA, 22 bp, synthetic construct
  misc_feature 1..22: note = chemically synthesized
  source 1..22: mol_type = other DNA
catacataaggaagtgtcatga

SEQ ID NO: 59931 - DNA, 22 bp, synthetic construct
  misc_feature 1..22: note = chemically synthesized
  source 1..22: mol_type = other DNA
cctctcacacttctccccagcc

SEQ ID NO: 59932 - DNA, 22 bp, synthetic construct
  misc_feature 1..22: note = chemically synthesized
  source 1..22: mol_type = other DNA
tcacacttctccccagccaccc

SEQ ID NO: 59933 - DNA, 22 bp, synthetic construct
  misc_feature 1..22: note = chemically synthesized
  source 1..22: mol_type = other DNA
acacttctccccagccacccag

SEQ ID NO: 59934 - DNA, 22 bp, synthetic construct
  misc_feature 1..22: note = chemically synthesized
  source 1..22: mol_type = other DNA
ctccccagccacccagttctcc

SEQ ID NO: 59935 - DNA, 22 bp, synthetic construct
  misc_feature 1..22: note = chemically synthesized
  source 1..22: mol_type = other DNA
tccccagccacccagttctccc

SEQ ID NO: 59936 - DNA, 22 bp, synthetic construct
  misc_feature 1..22: note = chemically synthesized
  source 1..22: mol_type = other DNA
cccagccacccagttctccctt

SEQ ID NO: 59937 - DNA, 22 bp, synthetic construct
  misc_feature 1..22: note = chemically synthesized
  source 1..22: mol_type = other DNA
tcccttctagaggcaacatgtg

SEQ ID NO: 59938 - DNA, 22 bp, synthetic construct
  misc_feature 1..22: note = chemically synthesized
  source 1..22: mol_type = other DNA
ccttctagaggcaacatgtgaa

SEQ ID NO: 59939 - DNA, 22 bp, synthetic construct
  misc_feature 1..22: note = chemically synthesized
  source 1..22: mol_type = other DNA
ctagaggcaacatgtgaaatcc

SEQ ID NO: 59940 - DNA, 22 bp, synthetic construct
  misc_feature 1..22: note = chemically synthesized
  source 1..22: mol_type = other DNA
tagaggcaacatgtgaaatcct

SEQ ID NO: 59941 - DNA, 22 bp, synthetic construct
  misc_feature 1..22: note = chemically synthesized
  source 1..22: mol_type = other DNA
gaggcaacatgtgaaatccttc

SEQ ID NO: 59942 - DNA, 22 bp, synthetic construct
  misc_feature 1..22: note = chemically synthesized
  source 1..22: mol_type = other DNA
ctcaggctacactcttcttgaa

SEQ ID NO: 59943 - DNA, 22 bp, synthetic construct
  misc_feature 1..22: note = chemically synthesized
  source 1..22: mol_type = other DNA
tcaggctacactcttcttgaag

SEQ ID NO: 59944 - DNA, 22 bp, synthetic construct
  misc_feature 1..22: note = chemically synthesized
  source 1..22: mol_type = other DNA
aggctacactcttcttgaaggt

SEQ ID NO: 59945 - DNA, 22 bp, synthetic construct
  misc_feature 1..22: note = chemically synthesized
  source 1..22: mol_type = other DNA
cactcttcttgaaggtgtaggc

SEQ ID NO: 59946 - DNA, 22 bp, synthetic construct
  misc_feature 1..22: note = chemically synthesized
  source 1..22: mol_type = other DNA
ttcttgaaggtgtaggctttgg

SEQ ID NO: 59947 - DNA, 22 bp, synthetic construct
  misc_feature 1..22: note = chemically synthesized
  source 1..22: mol_type = other DNA
cttgaaggtgtaggctttgggc

SEQ ID NO: 59948 - DNA, 22 bp, synthetic construct
  misc_feature 1..22: note = chemically synthesized
  source 1..22: mol_type = other DNA
ttgaaggtgtaggctttgggca

SEQ ID NO: 59949 - DNA, 22 bp, synthetic construct
  misc_feature 1..22: note = chemically synthesized
  source 1..22: mol_type = other DNA
gaaggtgtaggctttgggcaaa

SEQ ID NO: 59950 - DNA, 22 bp, synthetic construct
  misc_feature 1..22: note = chemically synthesized
  source 1..22: mol_type = other DNA
aaggtgtaggctttgggcaaaa

SEQ ID NO: 59951 - DNA, 22 bp, synthetic construct
  misc_feature 1..22: note = chemically synthesized
  source 1..22: mol_type = other DNA
tgggcaaaagcattcattcagt

SEQ ID NO: 59952 - DNA, 22 bp, synthetic construct
  misc_feature 1..22: note = chemically synthesized
  source 1..22: mol_type = other DNA
gggcaaaagcattcattcagta

SEQ ID NO: 59953 - DNA, 22 bp, synthetic construct
  misc_feature 1..22: note = chemically synthesized
  source 1..22: mol_type = other DNA
ggcaaaagcattcattcagtaa

SEQ ID NO: 59954 - DNA, 22 bp, synthetic construct
  misc_feature 1..22: note = chemically synthesized
  source 1..22: mol_type = other DNA
attcagtaaccccagaaacttg

SEQ ID NO: 59955 - DNA, 22 bp, synthetic construct
  misc_feature 1..22: note = chemically synthesized
  source 1..22: mol_type = other DNA
agtaaccccagaaacttgttct

SEQ ID NO: 59956 - DNA, 22 bp, synthetic construct
  misc_feature 1..22: note = chemically synthesized
  source 1..22: mol_type = other DNA
gttctgtttttccataggattc

SEQ ID NO: 59957 - DNA, 22 bp, synthetic construct
  misc_feature 1..22: note = chemically synthesized
  source 1..22: mol_type = other DNA
ttctgtttttccataggattct

SEQ ID NO: 59958 - DNA, 22 bp, synthetic construct
  misc_feature 1..22: note = chemically synthesized
  source 1..22: mol_type = other DNA
tgtttttccataggattctctt

SEQ ID NO: 59959 - DNA, 22 bp, synthetic construct
  misc_feature 1..22: note = chemically synthesized
  source 1..22: mol_type = other DNA
tttttccataggattctctttg

SEQ ID NO: 59960 - DNA, 22 bp, synthetic construct
  misc_feature 1..22: note = chemically synthesized
  source 1..22: mol_type = other DNA
ttccataggattctctttggac

SEQ ID NO: 59961 - DNA, 22 bp, synthetic construct
  misc_feature 1..22: note = chemically synthesized
  source 1..22: mol_type = other DNA
tccataggattctctttggaca

SEQ ID NO: 59962 - DNA, 22 bp, synthetic construct
  misc_feature 1..22: note = chemically synthesized
  source 1..22: mol_type = other DNA
ccataggattctctttggacag

SEQ ID NO: 59963 - DNA, 22 bp, synthetic construct
  misc_feature 1..22: note = chemically synthesized
  source 1..22: mol_type = other DNA
cataggattctctttggacagc

SEQ ID NO: 59964 - DNA, 22 bp, synthetic construct
  misc_feature 1..22: note = chemically synthesized
  source 1..22: mol_type = other DNA
tctttggacagcgtccatactg

SEQ ID NO: 59965 - DNA, 22 bp, synthetic construct
  misc_feature 1..22: note = chemically synthesized
  source 1..22: mol_type = other DNA
tttggacagcgtccatactggt

SEQ ID NO: 59966 - DNA, 22 bp, synthetic construct
  misc_feature 1..22: note = chemically synthesized
  source 1..22: mol_type = other DNA
tggacagcgtccatactggtgg

SEQ ID NO: 59967 - DNA, 22 bp, synthetic construct
  misc_feature 1..22: note = chemically synthesized
  source 1..22: mol_type = other DNA
ggacagcgtccatactggtggg

SEQ ID NO: 59968 - DNA, 22 bp, synthetic construct
  misc_feature 1..22: note = chemically synthesized
  source 1..22: mol_type = other DNA
gacagcgtccatactggtgggt

SEQ ID NO: 59969 - DNA, 22 bp, synthetic construct
  misc_feature 1..22: note = chemically synthesized
  source 1..22: mol_type = other DNA
gtgggttttggatactgactac

SEQ ID NO: 59970 - DNA, 22 bp, synthetic construct
  misc_feature 1..22: note = chemically synthesized
  source 1..22: mol_type = other DNA
tggatactgactactacagcaa

SEQ ID NO: 59971 - DNA, 22 bp, synthetic construct
  misc_feature 1..22: note = chemically synthesized
  source 1..22: mol_type = other DNA
ggatactgactactacagcaac

SEQ ID NO: 59972 - DNA, 22 bp, synthetic construct
  misc_feature 1..22: note = chemically synthesized
  source 1..22: mol_type = other DNA
gatactgactactacagcaaca

SEQ ID NO: 59973 - DNA, 22 bp, synthetic construct
  misc_feature 1..22: note = chemically synthesized
  source 1..22: mol_type = other DNA
actactacagcaacacttccgt

SEQ ID NO: 59974 - DNA, 22 bp, synthetic construct
  misc_feature 1..22: note = chemically synthesized
  source 1..22: mol_type = other DNA
ctacagcaacacttccgtgccc

SEQ ID NO: 59975 - DNA, 22 bp, synthetic construct
  misc_feature 1..22: note = chemically synthesized
  source 1..22: mol_type = other DNA
cagcaacacttccgtgcccctg

SEQ ID NO: 59976 - DNA, 22 bp, synthetic construct
  misc_feature 1..22: note = chemically synthesized
  source 1..22: mol_type = other DNA
ccgtgcccctgataaagcagtt

SEQ ID NO: 59977 - DNA, 22 bp, synthetic construct
  misc_feature 1..22: note = chemically synthesized
  source 1..22: mol_type = other DNA
cgtgcccctgataaagcagttc

SEQ ID NO: 59978 - DNA, 22 bp, synthetic construct
  misc_feature 1..22: note = chemically synthesized
  source 1..22: mol_type = other DNA
ataaagcagttccctgtaacct

SEQ ID NO: 59979 - DNA, 22 bp, synthetic construct
  misc_feature 1..22: note = chemically synthesized
  source 1..22: mol_type = other DNA
cctgtaacctgtgagactggac

SEQ ID NO: 59980 - DNA, 22 bp, synthetic construct
  misc_feature 1..22: note = chemically synthesized
  source 1..22: mol_type = other DNA
taacctgtgagactggaccagg

SEQ ID NO: 59981 - DNA, 22 bp, synthetic construct
  misc_feature 1..22: note = chemically synthesized
  source 1..22: mol_type = other DNA
tgagactggaccaggtaagcgt

SEQ ID NO: 59982 - DNA, 22 bp, synthetic construct
  misc_feature 1..22: note = chemically synthesized
  source 1..22: mol_type = other DNA
gaccaggtaagcgtcccagccc

SEQ ID NO: 59983 - DNA, 22 bp, synthetic construct
  misc_feature 1..22: note = chemically synthesized
  source 1..22: mol_type = other DNA
cagacagaagctgagtggacct

SEQ ID NO: 59984 - DNA, 22 bp, synthetic construct
  misc_feature 1..22: note = chemically synthesized
  source 1..22: mol_type = other DNA
agtggacctcgtttacctgtta

SEQ ID NO: 59985 - DNA, 22 bp, synthetic construct
  misc_feature 1..22: note = chemically synthesized
  source 1..22: mol_type = other DNA
gtttacctgttatggatgaaac

SEQ ID NO: 59986 - DNA, 22 bp, synthetic construct
  misc_feature 1..22: note = chemically synthesized
  source 1..22: mol_type = other DNA
acctgttatggatgaaactgac

SEQ ID NO: 59987 - DNA, 22 bp, synthetic construct
  misc_feature 1..22: note = chemically synthesized
  source 1..22: mol_type = other DNA
cctgttatggatgaaactgacc

SEQ ID NO: 59988 - DNA, 22 bp, synthetic construct
  misc_feature 1..22: note = chemically synthesized
  source 1..22: mol_type = other DNA
ttatggatgaaactgaccttga

SEQ ID NO: 59989 - DNA, 22 bp, synthetic construct
  misc_feature 1..22: note = chemically synthesized
  source 1..22: mol_type = other DNA
tggatgaaactgaccttgaggg

SEQ ID NO: 59990 - DNA, 22 bp, synthetic construct
  misc_feature 1..22: note = chemically synthesized
  source 1..22: mol_type = other DNA
accttgaggggacatgaggaga

SEQ ID NO: 59991 - DNA, 22 bp, synthetic construct
  misc_feature 1..22: note = chemically synthesized
  source 1..22: mol_type = other DNA
gaggggacatgaggagagccat

SEQ ID NO: 59992 - DNA, 22 bp, synthetic construct
  misc_feature 1..22: note = chemically synthesized
  source 1..22: mol_type = other DNA
aggggacatgaggagagccatt

SEQ ID NO: 59993 - DNA, 22 bp, synthetic construct
  misc_feature 1..22: note = chemically synthesized
  source 1..22: mol_type = other DNA
ctttgtacttttgtcatgctct

SEQ ID NO: 59994 - DNA, 22 bp, synthetic construct
  misc_feature 1..22: note = chemically synthesized
  source 1..22: mol_type = other DNA
tgtacttttgtcatgctcttca

SEQ ID NO: 59995 - DNA, 22 bp, synthetic construct
  misc_feature 1..22: note = chemically synthesized
  source 1..22: mol_type = other DNA
gtacttttgtcatgctcttcaa

SEQ ID NO: 59996 - DNA, 22 bp, synthetic construct
  misc_feature 1..22: note = chemically synthesized
  source 1..22: mol_type = other DNA
tacttttgtcatgctcttcaat

SEQ ID NO: 59997 - DNA, 22 bp, synthetic construct
  misc_feature 1..22: note = chemically synthesized
  source 1..22: mol_type = other DNA
ttgtcatgctcttcaattggca

SEQ ID NO: 59998 - DNA, 22 bp, synthetic construct
  misc_feature 1..22: note = chemically synthesized
  source 1..22: mol_type = other DNA
tgtcatgctcttcaattggcac

SEQ ID NO: 59999 - DNA, 22 bp, synthetic construct
  misc_feature 1..22: note = chemically synthesized
  source 1..22: mol_type = other DNA
gtcatgctcttcaattggcaca

SEQ ID NO: 60000 - DNA, 22 bp, synthetic construct
  misc_feature 1..22: note = chemically synthesized
  source 1..22: mol_type = other DNA
tcatgctcttcaattggcacaa

SEQ ID NO: 60001 - DNA, 22 bp, synthetic construct
  misc_feature 1..22: note = chemically synthesized
  source 1..22: mol_type = other DNA
ttcaattggcacaaattaattc

SEQ ID NO: 60002 - DNA, 22 bp, synthetic construct
  misc_feature 1..22: note = chemically synthesized
  source 1..22: mol_type = other DNA
caattggcacaaattaattcac

SEQ ID NO: 60003 - DNA, 22 bp, synthetic construct
  misc_feature 1..22: note = chemically synthesized
  source 1..22: mol_type = other DNA
aattggcacaaattaattcact

SEQ ID NO: 60004 - DNA, 22 bp, synthetic construct
  misc_feature 1..22: note = chemically synthesized
  source 1..22: mol_type = other DNA
gcacaaattaattcacttctgc

SEQ ID NO: 60005 - DNA, 22 bp, synthetic construct
  misc_feature 1..22: note = chemically synthesized
  source 1..22: mol_type = other DNA
attcacttctgcaatactttcc

SEQ ID NO: 60006 - DNA, 22 bp, synthetic construct
  misc_feature 1..22: note = chemically synthesized
  source 1..22: mol_type = other DNA
acttctgcaatactttcctgaa

SEQ ID NO: 60007 - DNA, 22 bp, synthetic construct
  misc_feature 1..22: note = chemically synthesized
  source 1..22: mol_type = other DNA
ctgcaatactttcctgaatagc

SEQ ID NO: 60008 - DNA, 22 bp, synthetic construct
  misc_feature 1..22: note = chemically synthesized
  source 1..22: mol_type = other DNA
tgcaatactttcctgaatagca

SEQ ID NO: 60009 - DNA, 22 bp, synthetic construct
  misc_feature 1..22: note = chemically synthesized
  source 1..22: mol_type = other DNA
caatactttcctgaatagcaca

SEQ ID NO: 60010 - DNA, 22 bp, synthetic construct
  misc_feature 1..22: note = chemically synthesized
  source 1..22: mol_type = other DNA
tcctgaatagcacagtagtatt

SEQ ID NO: 60011 - DNA, 22 bp, synthetic construct
  misc_feature 1..22: note = chemically synthesized
  source 1..22: mol_type = other DNA
cctgaatagcacagtagtattg

SEQ ID NO: 60012 - DNA, 22 bp, synthetic construct
  misc_feature 1..22: note = chemically synthesized
  source 1..22: mol_type = other DNA
ctgaatagcacagtagtattgg

SEQ ID NO: 60013 - DNA, 22 bp, synthetic construct
  misc_feature 1..22: note = chemically synthesized
  source 1..22: mol_type = other DNA
aatagcacagtagtattggaaa

SEQ ID NO: 60014 - DNA, 22 bp, synthetic construct
  misc_feature 1..22: note = chemically synthesized
  source 1..22: mol_type = other DNA
gaaatctgcctattacagaacc

SEQ ID NO: 60015 - DNA, 22 bp, synthetic construct
  misc_feature 1..22: note = chemically synthesized
  source 1..22: mol_type = other DNA
cctattacagaacctggatgga

SEQ ID NO: 60016 - DNA, 22 bp, synthetic construct
  misc_feature 1..22: note = chemically synthesized
  source 1..22: mol_type = other DNA
ttacagaacctggatggagtcc

SEQ ID NO: 60017 - DNA, 22 bp, synthetic construct
  misc_feature 1..22: note = chemically synthesized
  source 1..22: mol_type = other DNA
cagaacctggatggagtccaga

SEQ ID NO: 60018 - DNA, 22 bp, synthetic construct
  misc_feature 1..22: note = chemically synthesized
  source 1..22: mol_type = other DNA
gatggagtccagagaggcacgg

SEQ ID NO: 60019 - DNA, 22 bp, synthetic construct
  misc_feature 1..22: note = chemically synthesized
  source 1..22: mol_type = other DNA
gtgagagtcaccgccctgcagc

SEQ ID NO: 60020 - DNA, 22 bp, synthetic construct
  misc_feature 1..22: note = chemically synthesized
  source 1..22: mol_type = other DNA
cagcgctgtgtcctgagaaagg

SEQ ID NO: 60021 - DNA, 22 bp, synthetic construct
  misc_feature 1..22: note = chemically synthesized
  source 1..22: mol_type = other DNA
tgtcctgagaaaggagggggca

SEQ ID NO: 60022 - DNA, 22 bp, synthetic construct
  misc_feature 1..22: note = chemically synthesized
  source 1..22: mol_type = other DNA
agaaaggagggggcagaagcct

SEQ ID NO: 60023 - DNA, 22 bp, synthetic construct
  misc_feature 1..22: note = chemically synthesized
  source 1..22: mol_type = other DNA
agcttctgggggtccttcccaa

SEQ ID NO: 60024 - DNA, 22 bp, synthetic construct
  misc_feature 1..22: note = chemically synthesized
  source 1..22: mol_type = other DNA
ctgggggtccttcccaatggcc

SEQ ID NO: 60025 - DNA, 22 bp, synthetic construct
  misc_feature 1..22: note = chemically synthesized
  source 1..22: mol_type = other DNA
tgggggtccttcccaatggcct

SEQ ID NO: 60026 - DNA, 22 bp, synthetic construct
  misc_feature 1..22: note = chemically synthesized
  source 1..22: mol_type = other DNA
ggggtccttcccaatggcctgg

SEQ ID NO: 60027 - DNA, 22 bp, synthetic construct
  misc_feature 1..22: note = chemically synthesized
  source 1..22: mol_type = other DNA
cccaatggcctggcccactgga

SEQ ID NO: 60028 - DNA, 22 bp, synthetic construct
  misc_feature 1..22: note = chemically synthesized
  source 1..22: mol_type = other DNA
ccaatggcctggcccactggat

SEQ ID NO: 60029 - DNA, 22 bp, synthetic construct
  misc_feature 1..22: note = chemically synthesized
  source 1..22: mol_type = other DNA
gcccactggatgtgccctcctg

SEQ ID NO: 60030 - DNA, 22 bp, synthetic construct
  misc_feature 1..22: note = chemically synthesized
  source 1..22: mol_type = other DNA
gatgtgccctcctgagctgacc

SEQ ID NO: 60031 - DNA, 22 bp, synthetic construct
  misc_feature 1..22: note = chemically synthesized
  source 1..22: mol_type = other DNA
ctgagctgaccgtccaatccct

SEQ ID NO: 60032 - DNA, 22 bp, synthetic construct
  misc_feature 1..22: note = chemically synthesized
  source 1..22: mol_type = other DNA
agctgaccgtccaatcccttgc

SEQ ID NO: 60033 - DNA, 22 bp, synthetic construct
  misc_feature 1..22: note = chemically synthesized
  source 1..22: mol_type = other DNA
accgtccaatcccttgccctct

SEQ ID NO: 60034 - DNA, 22 bp, synthetic construct
  misc_feature 1..22: note = chemically synthesized
  source 1..22: mol_type = other DNA
gccctctctgtgcctacgtttt

SEQ ID NO: 60035 - DNA, 22 bp, synthetic construct
  misc_feature 1..22: note = chemically synthesized
  source 1..22: mol_type = other DNA
ccctctctgtgcctacgtttta

SEQ ID NO: 60036 - DNA, 22 bp, synthetic construct
  misc_feature 1..22: note = chemically synthesized
  source 1..22: mol_type = other DNA
tctgtgcctacgttttattagt

SEQ ID NO: 60037 - DNA, 22 bp, synthetic construct
  misc_feature 1..22: note = chemically synthesized
  source 1..22: mol_type = other DNA
tgtgcctacgttttattagtta

SEQ ID NO: 60038 - DNA, 22 bp, synthetic construct
  misc_feature 1..22: note = chemically synthesized
  source 1..22: mol_type = other DNA
tgcctacgttttattagttaca

SEQ ID NO: 60039 - DNA, 22 bp, synthetic construct
  misc_feature 1..22: note = chemically synthesized
  source 1..22: mol_type = other DNA
cgttttattagttacagccaga

SEQ ID NO: 60040 - DNA, 22 bp, synthetic construct
  misc_feature 1..22: note = chemically synthesized
  source 1..22: mol_type = other DNA
tattagttacagccagatggtt

SEQ ID NO: 60041 - DNA, 22 bp, synthetic construct
  misc_feature 1..22: note = chemically synthesized
  source 1..22: mol_type = other DNA
attagttacagccagatggtta

SEQ ID NO: 60042 - DNA, 22 bp, synthetic construct
  misc_feature 1..22: note = chemically synthesized
  source 1..22: mol_type = other DNA
ttagttacagccagatggttac

SEQ ID NO: 60043 - DNA, 22 bp, synthetic construct
  misc_feature 1..22: note = chemically synthesized
  source 1..22: mol_type = other DNA
gttacagccagatggttactgt

SEQ ID NO: 60044 - DNA, 22 bp, synthetic construct
  misc_feature 1..22: note = chemically synthesized
  source 1..22: mol_type = other DNA
cagccagatggttactgtcaaa

SEQ ID NO: 60045 - DNA, 22 bp, synthetic construct
  misc_feature 1..22: note = chemically synthesized
  source 1..22: mol_type = other DNA
ctgtcaaatcaaatgatagatt

SEQ ID NO: 60046 - DNA, 22 bp, synthetic construct
  misc_feature 1..22: note = chemically synthesized
  source 1..22: mol_type = other DNA
tcaaatcaaatgatagatttca

SEQ ID NO: 60047 - DNA, 22 bp, synthetic construct
  misc_feature 1..22: note = chemically synthesized
  source 1..22: mol_type = other DNA
cattttcagtatgtaataggaa

SEQ ID NO: 60048 - DNA, 22 bp, synthetic construct
  misc_feature 1..22: note = chemically synthesized
  source 1..22: mol_type = other DNA
attttcagtatgtaataggaag

SEQ ID NO: 60049 - DNA, 22 bp, synthetic construct
  misc_feature 1..22: note = chemically synthesized
  source 1..22: mol_type = other DNA
tcagtatgtaataggaagcccc

SEQ ID NO: 60050 - DNA, 22 bp, synthetic construct
  misc_feature 1..22: note = chemically synthesized
  source 1..22: mol_type = other DNA
cagtatgtaataggaagcccct

SEQ ID NO: 60051 - DNA, 22 bp, synthetic construct
  misc_feature 1..22: note = chemically synthesized
  source 1..22: mol_type = other DNA
agtatgtaataggaagcccctc

SEQ ID NO: 60052 - DNA, 22 bp, synthetic construct
  misc_feature 1..22: note = chemically synthesized
  source 1..22: mol_type = other DNA
cctcaccctaaagtctcagctg

SEQ ID NO: 60053 - DNA, 22 bp, synthetic construct
  misc_feature 1..22: note = chemically synthesized
  source 1..22: mol_type = other DNA
accctaaagtctcagctgccct

SEQ ID NO: 60054 - DNA, 22 bp, synthetic construct
  misc_feature 1..22: note = chemically synthesized
  source 1..22: mol_type = other DNA
aagtctcagctgccctctaaga

SEQ ID NO: 60055 - DNA, 22 bp, synthetic construct
  misc_feature 1..22: note = chemically synthesized
  source 1..22: mol_type = other DNA
agctgccctctaagactagtac

SEQ ID NO: 60056 - DNA, 22 bp, synthetic construct
  misc_feature 1..22: note = chemically synthesized
  source 1..22: mol_type = other DNA
ccctctaagactagtactctct

SEQ ID NO: 60057 - DNA, 22 bp, synthetic construct
  misc_feature 1..22: note = chemically synthesized
  source 1..22: mol_type = other DNA
taagactagtactctctaaggt

SEQ ID NO: 60058 - DNA, 22 bp, synthetic construct
  misc_feature 1..22: note = chemically synthesized
  source 1..22: mol_type = other DNA
agactagtactctctaaggtac

SEQ ID NO: 60059 - DNA, 22 bp, synthetic construct
  misc_feature 1..22: note = chemically synthesized
  source 1..22: mol_type = other DNA
gtactctctaaggtactagtat

SEQ ID NO: 60060 - DNA, 22 bp, synthetic construct
  misc_feature 1..22: note = chemically synthesized
  source 1..22: mol_type = other DNA
tctaaggtactagtatcccttc

SEQ ID NO: 60061 - DNA, 22 bp, synthetic construct
  misc_feature 1..22: note = chemically synthesized
  source 1..22: mol_type = other DNA
taaggtactagtatcccttcct

SEQ ID NO: 60062 - DNA, 22 bp, synthetic construct
  misc_feature 1..22: note = chemically synthesized
  source 1..22: mol_type = other DNA
aggtactagtatcccttcctca

SEQ ID NO: 60063 - DNA, 22 bp, synthetic construct
  misc_feature 1..22: note = chemically synthesized
  source 1..22: mol_type = other DNA
gtatcccttcctcagagaccct

SEQ ID NO: 60064 - DNA, 22 bp, synthetic construct
  misc_feature 1..22: note = chemically synthesized
  source 1..22: mol_type = other DNA
cctcagagaccctttccctgac

SEQ ID NO: 60065 - DNA, 22 bp, synthetic construct
  misc_feature 1..22: note = chemically synthesized
  source 1..22: mol_type = other DNA
ctcagagaccctttccctgacc

SEQ ID NO: 60066 - DNA, 22 bp, synthetic construct
  misc_feature 1..22: note = chemically synthesized
  source 1..22: mol_type = other DNA
agagaccctttccctgacccca

SEQ ID NO: 60067 - DNA, 22 bp, synthetic construct
  misc_feature 1..22: note = chemically synthesized
  source 1..22: mol_type = other DNA
tccctgaccccaaaactaggga

SEQ ID NO: 60068 - DNA, 22 bp, synthetic construct
  misc_feature 1..22: note = chemically synthesized
  source 1..22: mol_type = other DNA
ccctgaccccaaaactagggaa

SEQ ID NO: 60069 - DNA, 22 bp, synthetic construct
  misc_feature 1..22: note = chemically synthesized
  source 1..22: mol_type = other DNA
cctgaccccaaaactagggaag

SEQ ID NO: 60070 - DNA, 22 bp, synthetic construct
  misc_feature 1..22: note = chemically synthesized
  source 1..22: mol_type = other DNA
accccaaaactagggaaggtcc

SEQ ID NO: 60071 - DNA, 22 bp, synthetic construct
  misc_feature 1..22: note = chemically synthesized
  source 1..22: mol_type = other DNA
gggaaggtcccttagttatttg

SEQ ID NO: 60072 - DNA, 22 bp, synthetic construct
  misc_feature 1..22: note = chemically synthesized
  source 1..22: mol_type = other DNA
agttatttgctctcacagacca

SEQ ID NO: 60073 - DNA, 22 bp, synthetic construct
  misc_feature 1..22: note = chemically synthesized
  source 1..22: mol_type = other DNA
gttatttgctctcacagaccac

SEQ ID NO: 60074 - DNA, 22 bp, synthetic construct
  misc_feature 1..22: note = chemically synthesized
  source 1..22: mol_type = other DNA
tttgctctcacagaccacgcat

SEQ ID NO: 60075 - DNA, 22 bp, synthetic construct
  misc_feature 1..22: note = chemically synthesized
  source 1..22: mol_type = other DNA
gctctcacagaccacgcattta

SEQ ID NO: 60076 - DNA, 22 bp, synthetic construct
  misc_feature 1..22: note = chemically synthesized
  source 1..22: mol_type = other DNA
ctctcacagaccacgcatttac

SEQ ID NO: 60077 - DNA, 22 bp, synthetic construct
  misc_feature 1..22: note = chemically synthesized
  source 1..22: mol_type = other DNA
tcacagaccacgcatttacctc

SEQ ID NO: 60078 - DNA, 22 bp, synthetic construct
  misc_feature 1..22: note = chemically synthesized
  source 1..22: mol_type = other DNA
acagaccacgcatttacctcag

SEQ ID NO: 60079 - DNA, 22 bp, synthetic construct
  misc_feature 1..22: note = chemically synthesized
  source 1..22: mol_type = other DNA
acctcagagcatattcactcat

SEQ ID NO: 60080 - DNA, 22 bp, synthetic construct
  misc_feature 1..22: note = chemically synthesized
  source 1..22: mol_type = other DNA
cctcagagcatattcactcatt

SEQ ID NO: 60081 - DNA, 22 bp, synthetic construct
  misc_feature 1..22: note = chemically synthesized
  source 1..22: mol_type = other DNA
agagcatattcactcattcagc

SEQ ID NO: 60082 - DNA, 22 bp, synthetic construct
  misc_feature 1..22: note = chemically synthesized
  source 1..22: mol_type = other DNA
actcattcagctgttacttacc

SEQ ID NO: 60083 - DNA, 22 bp, synthetic construct
  misc_feature 1..22: note = chemically synthesized
  source 1..22: mol_type = other DNA
attcagctgttacttaccaagc

SEQ ID NO: 60084 - DNA, 22 bp, synthetic construct
  misc_feature 1..22: note = chemically synthesized
  source 1..22: mol_type = other DNA
agctgttacttaccaagcacct

SEQ ID NO: 60085 - DNA, 22 bp, synthetic construct
  misc_feature 1..22: note = chemically synthesized
  source 1..22: mol_type = other DNA
ttacttaccaagcacctactgg

SEQ ID NO: 60086 - DNA, 22 bp, synthetic construct
  misc_feature 1..22: note = chemically synthesized
  source 1..22: mol_type = other DNA
cttaccaagcacctactgggag

SEQ ID NO: 60087 - DNA, 22 bp, synthetic construct
  misc_feature 1..22: note = chemically synthesized
  source 1..22: mol_type = other DNA
accaagcacctactgggagcta

SEQ ID NO: 60088 - DNA, 22 bp, synthetic construct
  misc_feature 1..22: note = chemically synthesized
  source 1..22: mol_type = other DNA
ccaagcacctactgggagctat

SEQ ID NO: 60089 - DNA, 22 bp, synthetic construct
  misc_feature 1..22: note = chemically synthesized
  source 1..22: mol_type = other DNA
ctgggagctatacactgttcta

SEQ ID NO: 60090 - DNA, 22 bp, synthetic construct
  misc_feature 1..22: note = chemically synthesized
  source 1..22: mol_type = other DNA
ggagctatacactgttctatgt

SEQ ID NO: 60091 - DNA, 22 bp, synthetic construct
  misc_feature 1..22: note = chemically synthesized
  source 1..22: mol_type = other DNA
tacactgttctatgtgctaggg

SEQ ID NO: 60092 - DNA, 22 bp, synthetic construct
  misc_feature 1..22: note = chemically synthesized
  source 1..22: mol_type = other DNA
ttctatgtgctagggatacctc

SEQ ID NO: 60093 - DNA, 22 bp, synthetic construct
  misc_feature 1..22: note = chemically synthesized
  source 1..22: mol_type = other DNA
tatgtgctagggatacctctgt

SEQ ID NO: 60094 - DNA, 22 bp, synthetic construct
  misc_feature 1..22: note = chemically synthesized
  source 1..22: mol_type = other DNA
tgtgctagggatacctctgtca

SEQ ID NO: 60095 - DNA, 22 bp, synthetic construct
  misc_feature 1..22: note = chemically synthesized
  source 1..22: mol_type = other DNA
gggatacctctgtcagtgaaca

SEQ ID NO: 60096 - DNA, 22 bp, synthetic construct
  misc_feature 1..22: note = chemically synthesized
  source 1..22: mol_type = other DNA
tgtcagtgaacaacacagacac

SEQ ID NO: 60097 - DNA, 22 bp, synthetic construct
  misc_feature 1..22: note = chemically synthesized
  source 1..22: mol_type = other DNA
tcagtgaacaacacagacacaa

SEQ ID NO: 60098 - DNA, 22 bp, synthetic construct
  misc_feature 1..22: note = chemically synthesized
  source 1..22: mol_type = other DNA
cccttgtggagctgaaatctga

SEQ ID NO: 60099 - DNA, 22 bp, synthetic construct
  misc_feature 1..22: note = chemically synthesized
  source 1..22: mol_type = other DNA
gtggagctgaaatctgaataga

SEQ ID NO: 60100 - DNA, 22 bp, synthetic construct
  misc_feature 1..22: note = chemically synthesized
  source 1..22: mol_type = other DNA
tggagctgaaatctgaatagag

SEQ ID NO: 60101 - DNA, 22 bp, synthetic construct
  misc_feature 1..22: note = chemically synthesized
  source 1..22: mol_type = other DNA
aaatctgaatagaggaggtgaa

SEQ ID NO: 60102 - DNA, 22 bp, synthetic construct
  misc_feature 1..22: note = chemically synthesized
  source 1..22: mol_type = other DNA
aatagaggaggtgaaatataca

SEQ ID NO: 60103 - DNA, 22 bp, synthetic construct
  misc_feature 1..22: note = chemically synthesized
  source 1..22: mol_type = other DNA
taataaataagtaaactaggcc

SEQ ID NO: 60104 - DNA, 22 bp, synthetic construct
  misc_feature 1..22: note = chemically synthesized
  source 1..22: mol_type = other DNA
ggccagttgtggttgctcatgc

SEQ ID NO: 60105 - DNA, 22 bp, synthetic construct
  misc_feature 1..22: note = chemically synthesized
  source 1..22: mol_type = other DNA
tggttgctcatgcctgtaatcc

SEQ ID NO: 60106 - DNA, 22 bp, synthetic construct
  misc_feature 1..22: note = chemically synthesized
  source 1..22: mol_type = other DNA
ctcatgcctgtaatcccagcac

SEQ ID NO: 60107 - DNA, 22 bp, synthetic construct
  misc_feature 1..22: note = chemically synthesized
  source 1..22: mol_type = other DNA
atgcctgtaatcccagcacttt

SEQ ID NO: 60108 - DNA, 22 bp, synthetic construct
  misc_feature 1..22: note = chemically synthesized
  source 1..22: mol_type = other DNA
taatcccagcactttgggaagc

SEQ ID NO: 60109 - DNA, 22 bp, synthetic construct
  misc_feature 1..22: note = chemically synthesized
  source 1..22: mol_type = other DNA
tgggaagccaaggtaggtagat

SEQ ID NO: 60110 - DNA, 22 bp, synthetic construct
  misc_feature 1..22: note = chemically synthesized
  source 1..22: mol_type = other DNA
gggaagccaaggtaggtagatc

SEQ ID NO: 60111 - DNA, 22 bp, synthetic construct
  misc_feature 1..22: note = chemically synthesized
  source 1..22: mol_type = other DNA
ggaagccaaggtaggtagatca

SEQ ID NO: 60112 - DNA, 22 bp, synthetic construct
  misc_feature 1..22: note = chemically synthesized
  source 1..22: mol_type = other DNA
aggtcaggagttcaaaaccagc

SEQ ID NO: 60113 - DNA, 22 bp, synthetic construct
  misc_feature 1..22: note = chemically synthesized
  source 1..22: mol_type = other DNA
aaaaccagcctggccaacattg

SEQ ID NO: 60114 - DNA, 22 bp, synthetic construct
  misc_feature 1..22: note = chemically synthesized
  source 1..22: mol_type = other DNA
gccaacattgcaaaatcctgtc

SEQ ID NO: 60115 - DNA, 22 bp, synthetic construct
  misc_feature 1..22: note = chemically synthesized
  source 1..22: mol_type = other DNA
caaaatcctgtctttactaaaa

SEQ ID NO: 60116 - DNA, 22 bp, synthetic construct
  misc_feature 1..22: note = chemically synthesized
  source 1..22: mol_type = other DNA
tctttactaaaaatggaaaaat

SEQ ID NO: 60117 - DNA, 22 bp, synthetic construct
  misc_feature 1..22: note = chemically synthesized
  source 1..22: mol_type = other DNA
tactaaaaatggaaaaattggt

SEQ ID NO: 60118 - DNA, 22 bp, synthetic construct
  misc_feature 1..22: note = chemically synthesized
  source 1..22: mol_type = other DNA
actaaaaatggaaaaattggtc

SEQ ID NO: 60119 - DNA, 22 bp, synthetic construct
  misc_feature 1..22: note = chemically synthesized
  source 1..22: mol_type = other DNA
ctaaaaatggaaaaattggtca

SEQ ID NO: 60120 - DNA, 22 bp, synthetic construct
  misc_feature 1..22: note = chemically synthesized
  source 1..22: mol_type = other DNA
aaaatggaaaaattggtcaggc

SEQ ID NO: 60121 - DNA, 22 bp, synthetic construct
  misc_feature 1..22: note = chemically synthesized
  source 1..22: mol_type = other DNA
gtcaggcgtgatggcacacgcc

SEQ ID NO: 60122 - DNA, 22 bp, synthetic construct
  misc_feature 1..22: note = chemically synthesized
  source 1..22: mol_type = other DNA
tagtctcagctacctgggaggc

SEQ ID NO: 60123 - DNA, 22 bp, synthetic construct
  misc_feature 1..22: note = chemically synthesized
  source 1..22: mol_type = other DNA
agctacctgggaggctgaggca

SEQ ID NO: 60124 - DNA, 22 bp, synthetic construct
  misc_feature 1..22: note = chemically synthesized
  source 1..22: mol_type = other DNA
cctgggaggctgaggcaggaga

SEQ ID NO: 60125 - DNA, 22 bp, synthetic construct
  misc_feature 1..22: note = chemically synthesized
  source 1..22: mol_type = other DNA
ggaggctgaggcaggagaatcg

SEQ ID NO: 60126 - DNA, 22 bp, synthetic construct
  misc_feature 1..22: note = chemically synthesized
  source 1..22: mol_type = other DNA
aggcaggagaatcgcttgaacc

SEQ ID NO: 60127 - DNA, 22 bp, synthetic construct
  misc_feature 1..22: note = chemically synthesized
  source 1..22: mol_type = other DNA
gaacctgggaggcagaggttgc

SEQ ID NO: 60128 - DNA, 22 bp, synthetic construct
  misc_feature 1..22: note = chemically synthesized
  source 1..22: mol_type = other DNA
aacctgggaggcagaggttgca

SEQ ID NO: 60129 - DNA, 22 bp, synthetic construct
  misc_feature 1..22: note = chemically synthesized
  source 1..22: mol_type = other DNA
ggaggcagaggttgcagtgaac

SEQ ID NO: 60130 - DNA, 22 bp, synthetic construct
  misc_feature 1..22: note = chemically synthesized
  source 1..22: mol_type = other DNA
cagtgaaccgagatcggaccac

SEQ ID NO: 60131 - DNA, 22 bp, synthetic construct
  misc_feature 1..22: note = chemically synthesized
  source 1..22: mol_type = other DNA
cactccagcctgaatgacagaa

SEQ ID NO: 60132 - DNA, 22 bp, synthetic construct
  misc_feature 1..22: note = chemically synthesized
  source 1..22: mol_type = other DNA
cagcctgaatgacagaacgaga

SEQ ID NO: 60133 - DNA, 22 bp, synthetic construct
  misc_feature 1..22: note = chemically synthesized
  source 1..22: mol_type = other DNA
aatgacagaacgagactctgtc

SEQ ID NO: 60134 - DNA, 22 bp, synthetic construct
  misc_feature 1..22: note = chemically synthesized
  source 1..22: mol_type = other DNA
tgtctcaaaaaaaaagtaaact

SEQ ID NO: 60135 - DNA, 22 bp, synthetic construct
  misc_feature 1..22: note = chemically synthesized
  source 1..22: mol_type = other DNA
tctcaaaaaaaaagtaaactat

SEQ ID NO: 60136 - DNA, 22 bp, synthetic construct
  misc_feature 1..22: note = chemically synthesized
  source 1..22: mol_type = other DNA
aaaaaaaaagtaaactattaat

SEQ ID NO: 60137 - DNA, 22 bp, synthetic construct
  misc_feature 1..22: note = chemically synthesized
  source 1..22: mol_type = other DNA
ttaatatgtaggataggccagg

SEQ ID NO: 60138 - DNA, 22 bp, synthetic construct
  misc_feature 1..22: note = chemically synthesized
  source 1..22: mol_type = other DNA
atatgtaggataggccaggcac

SEQ ID NO: 60139 - DNA, 22 bp, synthetic construct
  misc_feature 1..22: note = chemically synthesized
  source 1..22: mol_type = other DNA
accctgtaatcccagcactttg

SEQ ID NO: 60140 - DNA, 22 bp, synthetic construct
  misc_feature 1..22: note = chemically synthesized
  source 1..22: mol_type = other DNA
taatcccagcactttgggaggc

SEQ ID NO: 60141 - DNA, 22 bp, synthetic construct
  misc_feature 1..22: note = chemically synthesized
  source 1..22: mol_type = other DNA
tgggaggctgaggcgggtggat

SEQ ID NO: 60142 - DNA, 22 bp, synthetic construct
  misc_feature 1..22: note = chemically synthesized
  source 1..22: mol_type = other DNA
gggaggctgaggcgggtggatc

SEQ ID NO: 60143 - DNA, 22 bp, synthetic construct
  misc_feature 1..22: note = chemically synthesized
  source 1..22: mol_type = other DNA
ggaggctgaggcgggtggatca

SEQ ID NO: 60144 - DNA, 22 bp, synthetic construct
  misc_feature 1..22: note = chemically synthesized
  source 1..22: mol_type = other DNA
aggcgggtggatcacctgaggt

SEQ ID NO: 60145 - DNA, 22 bp, synthetic construct
  misc_feature 1..22: note = chemically synthesized
  source 1..22: mol_type = other DNA
aggtgaggagttcaagaccagc

SEQ ID NO: 60146 - DNA, 22 bp, synthetic construct
  misc_feature 1..22: note = chemically synthesized
  source 1..22: mol_type = other DNA
aagaccagcctggccaacatgg

SEQ ID NO: 60147 - DNA, 22 bp, synthetic construct
  misc_feature 1..22: note = chemically synthesized
  source 1..22: mol_type = other DNA
gccaacatggcaaaaccctgtc

SEQ ID NO: 60148 - DNA, 22 bp, synthetic construct
  misc_feature 1..22: note = chemically synthesized
  source 1..22: mol_type = other DNA
tctctactaaaaatacaaaaat

SEQ ID NO: 60149 - DNA, 22 bp, synthetic construct
  misc_feature 1..22: note = chemically synthesized
  source 1..22: mol_type = other DNA
tactaaaaatacaaaaattagc

SEQ ID NO: 60150 - DNA, 22 bp, synthetic construct
  misc_feature 1..22: note = chemically synthesized
  source 1..22: mol_type = other DNA
ctaaaaatacaaaaattagctg

SEQ ID NO: 60151 - DNA, 22 bp, synthetic construct
  misc_feature 1..22: note = chemically synthesized
  source 1..22: mol_type = other DNA
aaaatacaaaaattagctgggt

SEQ ID NO: 60152 - DNA, 22 bp, synthetic construct
  misc_feature 1..22: note = chemically synthesized
  source 1..22: mol_type = other DNA
gctgggtgtcctggtgcatgcc

SEQ ID NO: 60153 - DNA, 22 bp, synthetic construct
  misc_feature 1..22: note = chemically synthesized
  source 1..22: mol_type = other DNA
ggtgtcctggtgcatgcctgta

SEQ ID NO: 60154 - DNA, 22 bp, synthetic construct
  misc_feature 1..22: note = chemically synthesized
  source 1..22: mol_type = other DNA
gtgcatgcctgtaatctgagct

SEQ ID NO: 60155 - DNA, 22 bp, synthetic construct
  misc_feature 1..22: note = chemically synthesized
  source 1..22: mol_type = other DNA
taatctgagctactcaggaggc

SEQ ID NO: 60156 - DNA, 22 bp, synthetic construct
  misc_feature 1..22: note = chemically synthesized
  source 1..22: mol_type = other DNA
agctactcaggaggctaaggca

SEQ ID NO: 60157 - DNA, 22 bp, synthetic construct
  misc_feature 1..22: note = chemically synthesized
  source 1..22: mol_type = other DNA
ctcaggaggctaaggcaggaga

SEQ ID NO: 60158 - DNA, 22 bp, synthetic construct
  misc_feature 1..22: note = chemically synthesized
  source 1..22: mol_type = other DNA
aggaggctaaggcaggagaatc

SEQ ID NO: 60159 - DNA, 22 bp, synthetic construct
  misc_feature 1..22: note = chemically synthesized
  source 1..22: mol_type = other DNA
aggcaggagaatcgcttgaacc

SEQ ID NO: 60160 - DNA, 22 bp, synthetic construct
  misc_feature 1..22: note = chemically synthesized
  source 1..22: mol_type = other DNA
gaacctgggaggtggtgagcca

SEQ ID NO: 60161 - DNA, 22 bp, synthetic construct
  misc_feature 1..22: note = chemically synthesized
  source 1..22: mol_type = other DNA
aacctgggaggtggtgagccaa

SEQ ID NO: 60162 - DNA, 22 bp, synthetic construct
  misc_feature 1..22: note = chemically synthesized
  source 1..22: mol_type = other DNA
ggaggtggtgagccaagattgc

SEQ ID NO: 60163 - DNA, 22 bp, synthetic construct
  misc_feature 1..22: note = chemically synthesized
  source 1..22: mol_type = other DNA
cgccattgcactccagcctggg

SEQ ID NO: 60164 - DNA, 22 bp, synthetic construct
  misc_feature 1..22: note = chemically synthesized
  source 1..22: mol_type = other DNA
cactccagcctgggcgacaaaa

SEQ ID NO: 60165 - DNA, 22 bp, synthetic construct
  misc_feature 1..22: note = chemically synthesized
  source 1..22: mol_type = other DNA
cagcctgggcgacaaaatgaga

SEQ ID NO: 60166 - DNA, 22 bp, synthetic construct
  misc_feature 1..22: note = chemically synthesized
  source 1..22: mol_type = other DNA
ggcgacaaaatgagacaccatc

SEQ ID NO: 60167 - DNA, 22 bp, synthetic construct
  misc_feature 1..22: note = chemically synthesized
  source 1..22: mol_type = other DNA
aaaaaaaaaaaaaaatatatat

SEQ ID NO: 60168 - DNA, 22 bp, synthetic construct
  misc_feature 1..22: note = chemically synthesized
  source 1..22: mol_type = other DNA
gaaaatgattgtttataggcaa

SEQ ID NO: 60169 - DNA, 22 bp, synthetic construct
  misc_feature 1..22: note = chemically synthesized
  source 1..22: mol_type = other DNA
tttataggcaaaaaaaaaaaaa

SEQ ID NO: 60170 - DNA, 22 bp, synthetic construct
  misc_feature 1..22: note = chemically synthesized
  source 1..22: mol_type = other DNA
ataggcaaaaaaaaaaaaaaag

SEQ ID NO: 60171 - DNA, 22 bp, synthetic construct
  misc_feature 1..22: note = chemically synthesized
  source 1..22: mol_type = other DNA
taggcaaaaaaaaaaaaaaaga

SEQ ID NO: 60172 - DNA, 22 bp, synthetic construct
  misc_feature 1..22: note = chemically synthesized
  source 1..22: mol_type = other DNA
ttgtagaaatatgtttgctttc

SEQ ID NO: 60173 - DNA, 22 bp, synthetic construct
  misc_feature 1..22: note = chemically synthesized
  source 1..22: mol_type = other DNA
tgtagaaatatgtttgctttca

SEQ ID NO: 60174 - DNA, 22 bp, synthetic construct
  misc_feature 1..22: note = chemically synthesized
  source 1..22: mol_type = other DNA
gtagaaatatgtttgctttcat

SEQ ID NO: 60175 - DNA, 22 bp, synthetic construct
  misc_feature 1..22: note = chemically synthesized
  source 1..22: mol_type = other DNA
tagaaatatgtttgctttcatc

SEQ ID NO: 60176 - DNA, 22 bp, synthetic construct
  misc_feature 1..22: note = chemically synthesized
  source 1..22: mol_type = other DNA
gctttcatcataacagcttgtt

SEQ ID NO: 60177 - DNA, 22 bp, synthetic construct
  misc_feature 1..22: note = chemically synthesized
  source 1..22: mol_type = other DNA
ctttcatcataacagcttgtta

SEQ ID NO: 60178 - DNA, 22 bp, synthetic construct
  misc_feature 1..22: note = chemically synthesized
  source 1..22: mol_type = other DNA
tcatcataacagcttgttatca

SEQ ID NO: 60179 - DNA, 22 bp, synthetic construct
  misc_feature 1..22: note = chemically synthesized
  source 1..22: mol_type = other DNA
catcataacagcttgttatcaa

SEQ ID NO: 60180 - DNA, 22 bp, synthetic construct
  misc_feature 1..22: note = chemically synthesized
  source 1..22: mol_type = other DNA
atcataacagcttgttatcaag

SEQ ID NO: 60181 - DNA, 22 bp, synthetic construct
  misc_feature 1..22: note = chemically synthesized
  source 1..22: mol_type = other DNA
gttatcaaggatgaatttctcc

SEQ ID NO: 60182 - DNA, 22 bp, synthetic construct
  misc_feature 1..22: note = chemically synthesized
  source 1..22: mol_type = other DNA
ttatcaaggatgaatttctccc

SEQ ID NO: 60183 - DNA, 22 bp, synthetic construct
  misc_feature 1..22: note = chemically synthesized
  source 1..22: mol_type = other DNA
tcaaggatgaatttctccctga

SEQ ID NO: 60184 - DNA, 22 bp, synthetic construct
  misc_feature 1..22: note = chemically synthesized
  source 1..22: mol_type = other DNA
ctccctgaaattaatggaggca

SEQ ID NO: 60185 - DNA, 22 bp, synthetic construct
  misc_feature 1..22: note = chemically synthesized
  source 1..22: mol_type = other DNA
tccctgaaattaatggaggcac

SEQ ID NO: 60186 - DNA, 22 bp, synthetic construct
  misc_feature 1..22: note = chemically synthesized
  source 1..22: mol_type = other DNA
cctgaaattaatggaggcacag

SEQ ID NO: 60187 - DNA, 22 bp, synthetic construct
  misc_feature 1..22: note = chemically synthesized
  source 1..22: mol_type = other DNA
aaattaatggaggcacagactg

SEQ ID NO: 60188 - DNA, 22 bp, synthetic construct
  misc_feature 1..22: note = chemically synthesized
  source 1..22: mol_type = other DNA
atggaggcacagactggaaagt

SEQ ID NO: 60189 - DNA, 22 bp, synthetic construct
  misc_feature 1..22: note = chemically synthesized
  source 1..22: mol_type = other DNA
gaaagtttaaagtggctttaag

SEQ ID NO: 60190 - DNA, 22 bp, synthetic construct
  misc_feature 1..22: note = chemically synthesized
  source 1..22: mol_type = other DNA
aaagtggctttaagaggttatt

SEQ ID NO: 60191 - DNA, 22 bp, synthetic construct
  misc_feature 1..22: note = chemically synthesized
  source 1..22: mol_type = other DNA
aagtggctttaagaggttattt

SEQ ID NO: 60192 - DNA, 22 bp, synthetic construct
  misc_feature 1..22: note = chemically synthesized
  source 1..22: mol_type = other DNA
taagaggttattttatttagtc

SEQ ID NO: 60193 - DNA, 22 bp, synthetic construct
  misc_feature 1..22: note = chemically synthesized
  source 1..22: mol_type = other DNA
aagaggttattttatttagtcc

SEQ ID NO: 60194 - DNA, 22 bp, synthetic construct
  misc_feature 1..22: note = chemically synthesized
  source 1..22: mol_type = other DNA
agaggttattttatttagtcct

SEQ ID NO: 60195 - DNA, 22 bp, synthetic construct
  misc_feature 1..22: note = chemically synthesized
  source 1..22: mol_type = other DNA
ttttatttagtcctctgtctta

SEQ ID NO: 60196 - DNA, 22 bp, synthetic construct
  misc_feature 1..22: note = chemically synthesized
  source 1..22: mol_type = other DNA
tatttagtcctctgtcttaata

SEQ ID NO: 60197 - DNA, 22 bp, synthetic construct
  misc_feature 1..22: note = chemically synthesized
  source 1..22: mol_type = other DNA
atttagtcctctgtcttaatag

SEQ ID NO: 60198 - DNA, 22 bp, synthetic construct
  misc_feature 1..22: note = chemically synthesized
  source 1..22: mol_type = other DNA
tttagtcctctgtcttaataga

SEQ ID NO: 60199 - DNA, 22 bp, synthetic construct
  misc_feature 1..22: note = chemically synthesized
  source 1..22: mol_type = other DNA
agtcctctgtcttaatagaagc

SEQ ID NO: 60200 - DNA, 22 bp, synthetic construct
  misc_feature 1..22: note = chemically synthesized
  source 1..22: mol_type = other DNA
gtcctctgtcttaatagaagca

SEQ ID NO: 60201 - DNA, 22 bp, synthetic construct
  misc_feature 1..22: note = chemically synthesized
  source 1..22: mol_type = other DNA
tgtcttaatagaagcaaattat

SEQ ID NO: 60202 - DNA, 22 bp, synthetic construct
  misc_feature 1..22: note = chemically synthesized
  source 1..22: mol_type = other DNA
tcttaatagaagcaaattatta

SEQ ID NO: 60203 - DNA, 22 bp, synthetic construct
  misc_feature 1..22: note = chemically synthesized
  source 1..22: mol_type = other DNA
aatagaagcaaattattatctc

SEQ ID NO: 60204 - DNA, 22 bp, synthetic construct
  misc_feature 1..22: note = chemically synthesized
  source 1..22: mol_type = other DNA
atagaagcaaattattatctct

SEQ ID NO: 60205 - DNA, 22 bp, synthetic construct
  misc_feature 1..22: note = chemically synthesized
  source 1..22: mol_type = other DNA
ttatctctgctccttaggtaga

SEQ ID NO: 60206 - DNA, 22 bp, synthetic construct
  misc_feature 1..22: note = chemically synthesized
  source 1..22: mol_type = other DNA
tctctgctccttaggtagagta

SEQ ID NO: 60207 - DNA, 22 bp, synthetic construct
  misc_feature 1..22: note = chemically synthesized
  source 1..22: mol_type = other DNA
tgctccttaggtagagtagcta

SEQ ID NO: 60208 - DNA, 22 bp, synthetic construct
  misc_feature 1..22: note = chemically synthesized
  source 1..22: mol_type = other DNA
ctccttaggtagagtagctaag

SEQ ID NO: 60209 - DNA, 22 bp, synthetic construct
  misc_feature 1..22: note = chemically synthesized
  source 1..22: mol_type = other DNA
cttaggtagagtagctaaggct

SEQ ID NO: 60210 - DNA, 22 bp, synthetic construct
  misc_feature 1..22: note = chemically synthesized
  source 1..22: mol_type = other DNA
aggtagagtagctaaggctcag

SEQ ID NO: 60211 - DNA, 22 bp, synthetic construct
  misc_feature 1..22: note = chemically synthesized
  source 1..22: mol_type = other DNA
ggtagagtagctaaggctcaga

SEQ ID NO: 60212 - DNA, 22 bp, synthetic construct
  misc_feature 1..22: note = chemically synthesized
  source 1..22: mol_type = other DNA
aggctcagaaagtaggccgggc

SEQ ID NO: 60213 - DNA, 22 bp, synthetic construct
  misc_feature 1..22: note = chemically synthesized
  source 1..22: mol_type = other DNA
agaaagtaggccgggcgcggtg

SEQ ID NO: 60214 - DNA, 22 bp, synthetic construct
  misc_feature 1..22: note = chemically synthesized
  source 1..22: mol_type = other DNA
acgcctgtaatcctagcacttt

SEQ ID NO: 60215 - DNA, 22 bp, synthetic construct
  misc_feature 1..22: note = chemically synthesized
  source 1..22: mol_type = other DNA
taatcctagcactttgggaggc

SEQ ID NO: 60216 - DNA, 22 bp, synthetic construct
  misc_feature 1..22: note = chemically synthesized
  source 1..22: mol_type = other DNA
gcactttgggaggccaacgcag

SEQ ID NO: 60217 - DNA, 22 bp, synthetic construct
  misc_feature 1..22: note = chemically synthesized
  source 1..22: mol_type = other DNA
tgggaggccaacgcaggtggat

SEQ ID NO: 60218 - DNA, 22 bp, synthetic construct
  misc_feature 1..22: note = chemically synthesized
  source 1..22: mol_type = other DNA
gggaggccaacgcaggtggatc

SEQ ID NO: 60219 - DNA, 22 bp, synthetic construct
  misc_feature 1..22: note = chemically synthesized
  source 1..22: mol_type = other DNA
ggaggccaacgcaggtggatca

SEQ ID NO: 60220 - DNA, 22 bp, synthetic construct
  misc_feature 1..22: note = chemically synthesized
  source 1..22: mol_type = other DNA
aggtcaggagtttgagaccagc

SEQ ID NO: 60221 - DNA, 22 bp, synthetic construct
  misc_feature 1..22: note = chemically synthesized
  source 1..22: mol_type = other DNA
gagaccagcctggccaacatgg

SEQ ID NO: 60222 - DNA, 22 bp, synthetic construct
  misc_feature 1..22: note = chemically synthesized
  source 1..22: mol_type = other DNA
agaccagcctggccaacatggt

SEQ ID NO: 60223 - DNA, 22 bp, synthetic construct
  misc_feature 1..22: note = chemically synthesized
  source 1..22: mol_type = other DNA
gccaacatggtgaaacctcgtc

SEQ ID NO: 60224 - DNA, 22 bp, synthetic construct
  misc_feature 1..22: note = chemically synthesized
  source 1..22: mol_type = other DNA
gtcactaataaaaaaatacaaa

SEQ ID NO: 60225 - DNA, 22 bp, synthetic construct
  misc_feature 1..22: note = chemically synthesized
  source 1..22: mol_type = other DNA
ataaaaaaatacaaaaacttag

SEQ ID NO: 60226 - DNA, 22 bp, synthetic construct
  misc_feature 1..22: note = chemically synthesized
  source 1..22: mol_type = other DNA
agccaggcatggtggcgggcgc

SEQ ID NO: 60227 - DNA, 22 bp, synthetic construct
  misc_feature 1..22: note = chemically synthesized
  source 1..22: mol_type = other DNA
gccaggcatggtggcgggcgcc

SEQ ID NO: 60228 - DNA, 22 bp, synthetic construct
  misc_feature 1..22: note = chemically synthesized
  source 1..22: mol_type = other DNA
taatcccagctacccaggaggc

SEQ ID NO: 60229 - DNA, 22 bp, synthetic construct
  misc_feature 1..22: note = chemically synthesized
  source 1..22: mol_type = other DNA
cccaggaggctgcggcaggaga

SEQ ID NO: 60230 - DNA, 22 bp, synthetic construct
  misc_feature 1..22: note = chemically synthesized
  source 1..22: mol_type = other DNA
cggcaggagaatcacttcaacc

SEQ ID NO: 60231 - DNA, 22 bp, synthetic construct
  misc_feature 1..22: note = chemically synthesized
  source 1..22: mol_type = other DNA
caacccgggaggcagaggttgc

SEQ ID NO: 60232 - DNA, 22 bp, synthetic construct
  misc_feature 1..22: note = chemically synthesized
  source 1..22: mol_type = other DNA
aacccgggaggcagaggttgca

SEQ ID NO: 60233 - DNA, 22 bp, synthetic construct
  misc_feature 1..22: note = chemically synthesized
  source 1..22: mol_type = other DNA
cagtgagctgaaatcacaccac

SEQ ID NO: 60234 - DNA, 22 bp, synthetic construct
  misc_feature 1..22: note = chemically synthesized
  source 1..22: mol_type = other DNA
aaatcacaccactgcactccag

SEQ ID NO: 60235 - DNA, 22 bp, synthetic construct
  misc_feature 1..22: note = chemically synthesized
  source 1..22: mol_type = other DNA
cactccagccttggtgacagag

SEQ ID NO: 60236 - DNA, 22 bp, synthetic construct
  misc_feature 1..22: note = chemically synthesized
  source 1..22: mol_type = other DNA
cagccttggtgacagagaaaga

SEQ ID NO: 60237 - DNA, 22 bp, synthetic construct
  misc_feature 1..22: note = chemically synthesized
  source 1..22: mol_type = other DNA
ggtgacagagaaagattctgtc

SEQ ID NO: 60238 - DNA, 22 bp, synthetic construct
  misc_feature 1..22: note = chemically synthesized
  source 1..22: mol_type = other DNA
gtgacagagaaagattctgtca

SEQ ID NO: 60239 - DNA, 22 bp, synthetic construct
  misc_feature 1..22: note = chemically synthesized
  source 1..22: mol_type = other DNA
tgtcaggaaaaaaaaaaaaaag

SEQ ID NO: 60240 - DNA, 22 bp, synthetic construct
  misc_feature 1..22: note = chemically synthesized
  source 1..22: mol_type = other DNA
tcaggaaaaaaaaaaaaaagtt

SEQ ID NO: 60241 - DNA, 22 bp, synthetic construct
  misc_feature 1..22: note = chemically synthesized
  source 1..22: mol_type = other DNA
aaatgaattacccaaggtatat

SEQ ID NO: 60242 - DNA, 22 bp, synthetic construct
  misc_feature 1..22: note = chemically synthesized
  source 1..22: mol_type = other DNA
aatgaattacccaaggtatata

SEQ ID NO: 60243 - DNA, 22 bp, synthetic construct
  misc_feature 1..22: note = chemically synthesized
  source 1..22: mol_type = other DNA
cccaaggtatataattgttagt

SEQ ID NO: 60244 - DNA, 22 bp, synthetic construct
  misc_feature 1..22: note = chemically synthesized
  source 1..22: mol_type = other DNA
ttagtgttagaaggaagaagaa

SEQ ID NO: 60245 - DNA, 22 bp, synthetic construct
  misc_feature 1..22: note = chemically synthesized
  source 1..22: mol_type = other DNA
gtgttagaaggaagaagaaggg

SEQ ID NO: 60246 - DNA, 22 bp, synthetic construct
  misc_feature 1..22: note = chemically synthesized
  source 1..22: mol_type = other DNA
gaaggaagaagaagggagggag

SEQ ID NO: 60247 - DNA, 22 bp, synthetic construct
  misc_feature 1..22: note = chemically synthesized
  source 1..22: mol_type = other DNA
tatttatctatggggttccctg

SEQ ID NO: 60248 - DNA, 22 bp, synthetic construct
  misc_feature 1..22: note = chemically synthesized
  source 1..22: mol_type = other DNA
atttatctatggggttccctgg

SEQ ID NO: 60249 - DNA, 22 bp, synthetic construct
  misc_feature 1..22: note = chemically synthesized
  source 1..22: mol_type = other DNA
tttatctatggggttccctgga

SEQ ID NO: 60250 - DNA, 22 bp, synthetic construct
  misc_feature 1..22: note = chemically synthesized
  source 1..22: mol_type = other DNA
atctatggggttccctggaaag

SEQ ID NO: 60251 - DNA, 22 bp, synthetic construct
  misc_feature 1..22: note = chemically synthesized
  source 1..22: mol_type = other DNA
tctatggggttccctggaaagc

SEQ ID NO: 60252 - DNA, 22 bp, synthetic construct
  misc_feature 1..22: note = chemically synthesized
  source 1..22: mol_type = other DNA
tggggttccctggaaagcaggc

SEQ ID NO: 60253 - DNA, 22 bp, synthetic construct
  misc_feature 1..22: note = chemically synthesized
  source 1..22: mol_type = other DNA
cctggaaagcaggctgaaatgg

SEQ ID NO: 60254 - DNA, 22 bp, synthetic construct
  misc_feature 1..22: note = chemically synthesized
  source 1..22: mol_type = other DNA
gaaagcaggctgaaatggagat

SEQ ID NO: 60255 - DNA, 22 bp, synthetic construct
  misc_feature 1..22: note = chemically synthesized
  source 1..22: mol_type = other DNA
aaatggagattcacgtgcagga

SEQ ID NO: 60256 - DNA, 22 bp, synthetic construct
  misc_feature 1..22: note = chemically synthesized
  source 1..22: mol_type = other DNA
acgtgcaggagtttagatactc

SEQ ID NO: 60257 - DNA, 22 bp, synthetic construct
  misc_feature 1..22: note = chemically synthesized
  source 1..22: mol_type = other DNA
agatactctggggaactatact

SEQ ID NO: 60258 - DNA, 22 bp, synthetic construct
  misc_feature 1..22: note = chemically synthesized
  source 1..22: mol_type = other DNA
gatactctggggaactatactt

SEQ ID NO: 60259 - DNA, 22 bp, synthetic construct
  misc_feature 1..22: note = chemically synthesized
  source 1..22: mol_type = other DNA
tggggaactatacttgtagaag

SEQ ID NO: 60260 - DNA, 22 bp, synthetic construct
  misc_feature 1..22: note = chemically synthesized
  source 1..22: mol_type = other DNA
gggaactatacttgtagaaggg

SEQ ID NO: 60261 - DNA, 22 bp, synthetic construct
  misc_feature 1..22: note = chemically synthesized
  source 1..22: mol_type = other DNA
tacttgtagaagggaaggaaca

SEQ ID NO: 60262 - DNA, 22 bp, synthetic construct
  misc_feature 1..22: note = chemically synthesized
  source 1..22: mol_type = other DNA
gtagaagggaaggaacaggaac

SEQ ID NO: 60263 - DNA, 22 bp, synthetic construct
  misc_feature 1..22: note = chemically synthesized
  source 1..22: mol_type = other DNA
tagaagggaaggaacaggaaca

SEQ ID NO: 60264 - DNA, 22 bp, synthetic construct
  misc_feature 1..22: note = chemically synthesized
  source 1..22: mol_type = other DNA
tgattctgcctcatccaacccc

SEQ ID NO: 60265 - DNA, 22 bp, synthetic construct
  misc_feature 1..22: note = chemically synthesized
  source 1..22: mol_type = other DNA
tgcctcatccaaccccacagcg

SEQ ID NO: 60266 - DNA, 22 bp, synthetic construct
  misc_feature 1..22: note = chemically synthesized
  source 1..22: mol_type = other DNA
cctcatccaaccccacagcgag

SEQ ID NO: 60267 - DNA, 22 bp, synthetic construct
  misc_feature 1..22: note = chemically synthesized
  source 1..22: mol_type = other DNA
atccaaccccacagcgagctct

SEQ ID NO: 60268 - DNA, 22 bp, synthetic construct
  misc_feature 1..22: note = chemically synthesized
  source 1..22: mol_type = other DNA
tgaagctggggatggctcctca

SEQ ID NO: 60269 - DNA, 22 bp, synthetic construct
  misc_feature 1..22: note = chemically synthesized
  source 1..22: mol_type = other DNA
aagctggggatggctcctcaga

SEQ ID NO: 60270 - DNA, 22 bp, synthetic construct
  misc_feature 1..22: note = chemically synthesized
  source 1..22: mol_type = other DNA
gggatggctcctcagagttggt

SEQ ID NO: 60271 - DNA, 22 bp, synthetic construct
  misc_feature 1..22: note = chemically synthesized
  source 1..22: mol_type = other DNA
ctcagagttggtccaagttggg

SEQ ID NO: 60272 - DNA, 22 bp, synthetic construct
  misc_feature 1..22: note = chemically synthesized
  source 1..22: mol_type = other DNA
agagttggtccaagttgggaca

SEQ ID NO: 60273 - DNA, 22 bp, synthetic construct
  misc_feature 1..22: note = chemically synthesized
  source 1..22: mol_type = other DNA
gtccaagttgggacaagggaat

SEQ ID NO: 60274 - DNA, 22 bp, synthetic construct
  misc_feature 1..22: note = chemically synthesized
  source 1..22: mol_type = other DNA
ggacaagggaatcagaccctgg

SEQ ID NO: 60275 - DNA, 22 bp, synthetic construct
  misc_feature 1..22: note = chemically synthesized
  source 1..22: mol_type = other DNA
gggagagcgtaaccttgatcaa

SEQ ID NO: 60276 - DNA, 22 bp, synthetic construct
  misc_feature 1..22: note = chemically synthesized
  source 1..22: mol_type = other DNA
gatcaaggcgactctctttagc

SEQ ID NO: 60277 - DNA, 22 bp, synthetic construct
  misc_feature 1..22: note = chemically synthesized
  source 1..22: mol_type = other DNA
atcaaggcgactctctttagcc

SEQ ID NO: 60278 - DNA, 22 bp, synthetic construct
  misc_feature 1..22: note = chemically synthesized
  source 1..22: mol_type = other DNA
tctttagcccagggcaatgcca

SEQ ID NO: 60279 - DNA, 22 bp, synthetic construct
  misc_feature 1..22: note = chemically synthesized
  source 1..22: mol_type = other DNA
tttagcccagggcaatgccagg

SEQ ID NO: 60280 - DNA, 22 bp, synthetic construct
  misc_feature 1..22: note = chemically synthesized
  source 1..22: mol_type = other DNA
tagcccagggcaatgccaggag

SEQ ID NO: 60281 - DNA, 22 bp, synthetic construct
  misc_feature 1..22: note = chemically synthesized
  source 1..22: mol_type = other DNA
agcccagggcaatgccaggaga

SEQ ID NO: 60282 - DNA, 22 bp, synthetic construct
  misc_feature 1..22: note = chemically synthesized
  source 1..22: mol_type = other DNA
gcccagggcaatgccaggagaa

SEQ ID NO: 60283 - DNA, 22 bp, synthetic construct
  misc_feature 1..22: note = chemically synthesized
  source 1..22: mol_type = other DNA
agagcagaaagccatctaccat

SEQ ID NO: 60284 - DNA, 22 bp, synthetic construct
  misc_feature 1..22: note = chemically synthesized
  source 1..22: mol_type = other DNA
ccatcacactctcaacagctac

SEQ ID NO: 60285 - DNA, 22 bp, synthetic construct
  misc_feature 1..22: note = chemically synthesized
  source 1..22: mol_type = other DNA
tcaacagctacgaaataagtcc

SEQ ID NO: 60286 - DNA, 22 bp, synthetic construct
  misc_feature 1..22: note = chemically synthesized
  source 1..22: mol_type = other DNA
aacagctacgaaataagtcctg

SEQ ID NO: 60287 - DNA, 22 bp, synthetic construct
  misc_feature 1..22: note = chemically synthesized
  source 1..22: mol_type = other DNA
cgaaataagtcctgcagttcag

SEQ ID NO: 60288 - DNA, 22 bp, synthetic construct
  misc_feature 1..22: note = chemically synthesized
  source 1..22: mol_type = other DNA
cagttcaggagggaggtctggg

SEQ ID NO: 60289 - DNA, 22 bp, synthetic construct
  misc_feature 1..22: note = chemically synthesized
  source 1..22: mol_type = other DNA
aggagggaggtctgggcggcac

SEQ ID NO: 60290 - DNA, 22 bp, synthetic construct
  misc_feature 1..22: note = chemically synthesized
  source 1..22: mol_type = other DNA
ggcggcacatctcaggaccctc

SEQ ID NO: 60291 - DNA, 22 bp, synthetic construct
  misc_feature 1..22: note = chemically synthesized
  source 1..22: mol_type = other DNA
aggaccctctatctctcagggt

SEQ ID NO: 60292 - DNA, 22 bp, synthetic construct
  misc_feature 1..22: note = chemically synthesized
  source 1..22: mol_type = other DNA
tatctctcagggtagaggaatt

SEQ ID NO: 60293 - DNA, 22 bp, synthetic construct
  misc_feature 1..22: note = chemically synthesized
  source 1..22: mol_type = other DNA
tctctcagggtagaggaattaa

SEQ ID NO: 60294 - DNA, 22 bp, synthetic construct
  misc_feature 1..22: note = chemically synthesized
  source 1..22: mol_type = other DNA
tcagggtagaggaattaagaat

SEQ ID NO: 60295 - DNA, 22 bp, synthetic construct
  misc_feature 1..22: note = chemically synthesized
  source 1..22: mol_type = other DNA
agggtagaggaattaagaatgg

SEQ ID NO: 60296 - DNA, 22 bp, synthetic construct
  misc_feature 1..22: note = chemically synthesized
  source 1..22: mol_type = other DNA
agaatgggatgggaaccagacg

SEQ ID NO: 60297 - DNA, 22 bp, synthetic construct
  misc_feature 1..22: note = chemically synthesized
  source 1..22: mol_type = other DNA
acacctataatcccaacacttt

SEQ ID NO: 60298 - DNA, 22 bp, synthetic construct
  misc_feature 1..22: note = chemically synthesized
  source 1..22: mol_type = other DNA
taatcccaacactttgggaggc

SEQ ID NO: 60299 - DNA, 22 bp, synthetic construct
  misc_feature 1..22: note = chemically synthesized
  source 1..22: mol_type = other DNA
tgggaggccaagggtaggagga

SEQ ID NO: 60300 - DNA, 22 bp, synthetic construct
  misc_feature 1..22: note = chemically synthesized
  source 1..22: mol_type = other DNA
gggaggccaagggtaggaggat

SEQ ID NO: 60301 - DNA, 22 bp, synthetic construct
  misc_feature 1..22: note = chemically synthesized
  source 1..22: mol_type = other DNA
ggaggccaagggtaggaggatt

SEQ ID NO: 60302 - DNA, 22 bp, synthetic construct
  misc_feature 1..22: note = chemically synthesized
  source 1..22: mol_type = other DNA
cttgagcccaagagttcaaaac

SEQ ID NO: 60303 - DNA, 22 bp, synthetic construct
  misc_feature 1..22: note = chemically synthesized
  source 1..22: mol_type = other DNA
gagcccaagagttcaaaaccag

SEQ ID NO: 60304 - DNA, 22 bp, synthetic construct
  misc_feature 1..22: note = chemically synthesized
  source 1..22: mol_type = other DNA
agcccaagagttcaaaaccagc

SEQ ID NO: 60305 - DNA, 22 bp, synthetic construct
  misc_feature 1..22: note = chemically synthesized
  source 1..22: mol_type = other DNA
aaaaccagcctgggcaaaaaca

SEQ ID NO: 60306 - DNA, 22 bp, synthetic construct
  misc_feature 1..22: note = chemically synthesized
  source 1..22: mol_type = other DNA
ggcaaaaacaatcaaacaaaca

SEQ ID NO: 60307 - DNA, 22 bp, synthetic construct
  misc_feature 1..22: note = chemically synthesized
  source 1..22: mol_type = other DNA
aaaaaatttgctgtgtgtggtg

SEQ ID NO: 60308 - DNA, 22 bp, synthetic construct
  misc_feature 1..22: note = chemically synthesized
  source 1..22: mol_type = other DNA
aaaaatttgctgtgtgtggtgg

SEQ ID NO: 60309 - DNA, 22 bp, synthetic construct
  misc_feature 1..22: note = chemically synthesized
  source 1..22: mol_type = other DNA
gctgtgtgtggtggtgtgcacc

SEQ ID NO: 60310 - DNA, 22 bp, synthetic construct
  misc_feature 1..22: note = chemically synthesized
  source 1..22: mol_type = other DNA
ctgtgtgtggtggtgtgcacct

SEQ ID NO: 60311 - DNA, 22 bp, synthetic construct
  misc_feature 1..22: note = chemically synthesized
  source 1..22: mol_type = other DNA
tgtgtggtggtgtgcacctgtg

SEQ ID NO: 60312 - DNA, 22 bp, synthetic construct
  misc_feature 1..22: note = chemically synthesized
  source 1..22: mol_type = other DNA
tggtcccagctactcagggggc

SEQ ID NO: 60313 - DNA, 22 bp, synthetic construct
  misc_feature 1..22: note = chemically synthesized
  source 1..22: mol_type = other DNA
ctcagggggctgaggtgggagg

SEQ ID NO: 60314 - DNA, 22 bp, synthetic construct
  misc_feature 1..22: note = chemically synthesized
  source 1..22: mol_type = other DNA
agggggctgaggtgggaggatt

SEQ ID NO: 60315 - DNA, 22 bp, synthetic construct
  misc_feature 1..22: note = chemically synthesized
  source 1..22: mol_type = other DNA
aggtgggaggattgcttgagtc

SEQ ID NO: 60316 - DNA, 22 bp, synthetic construct
  misc_feature 1..22: note = chemically synthesized
  source 1..22: mol_type = other DNA
cttgagtccaggaggtcgaggc

SEQ ID NO: 60317 - DNA, 22 bp, synthetic construct
  misc_feature 1..22: note = chemically synthesized
  source 1..22: mol_type = other DNA
gagtccaggaggtcgaggctgc

SEQ ID NO: 60318 - DNA, 22 bp, synthetic construct
  misc_feature 1..22: note = chemically synthesized
  source 1..22: mol_type = other DNA
agtccaggaggtcgaggctgca

SEQ ID NO: 60319 - DNA, 22 bp, synthetic construct
  misc_feature 1..22: note = chemically synthesized
  source 1..22: mol_type = other DNA
cagtgagctatgatcatggcac

SEQ ID NO: 60320 - DNA, 22 bp, synthetic construct
  misc_feature 1..22: note = chemically synthesized
  source 1..22: mol_type = other DNA
tgatcatggcactgcattgcag

SEQ ID NO: 60321 - DNA, 22 bp, synthetic construct
  misc_feature 1..22: note = chemically synthesized
  source 1..22: mol_type = other DNA
cattgcagcctaggagacaaag

SEQ ID NO: 60322 - DNA, 22 bp, synthetic construct
  misc_feature 1..22: note = chemically synthesized
  source 1..22: mol_type = other DNA
cagcctaggagacaaagcaaga

SEQ ID NO: 60323 - DNA, 22 bp, synthetic construct
  misc_feature 1..22: note = chemically synthesized
  source 1..22: mol_type = other DNA
ggagacaaagcaagacactgtc

SEQ ID NO: 60324 - DNA, 22 bp, synthetic construct
  misc_feature 1..22: note = chemically synthesized
  source 1..22: mol_type = other DNA
tctctaaaaaaacaaaaaacaa

SEQ ID NO: 60325 - DNA, 22 bp, synthetic construct
  misc_feature 1..22: note = chemically synthesized
  source 1..22: mol_type = other DNA
taaaaaaacaaaaaacaaacaa

SEQ ID NO: 60326 - DNA, 22 bp, synthetic construct
  misc_feature 1..22: note = chemically synthesized
  source 1..22: mol_type = other DNA
aaaaaacaaaaaacaaacaaat

SEQ ID NO: 60327 - DNA, 22 bp, synthetic construct
  misc_feature 1..22: note = chemically synthesized
  source 1..22: mol_type = other DNA
caagcagggttaaatagcgtgg

SEQ ID NO: 60328 - DNA, 22 bp, synthetic construct
  misc_feature 1..22: note = chemically synthesized
  source 1..22: mol_type = other DNA
aatagcgtggtcagagtaggac

SEQ ID NO: 60329 - DNA, 22 bp, synthetic construct
  misc_feature 1..22: note = chemically synthesized
  source 1..22: mol_type = other DNA
actgagaatatgagatctgagt

SEQ ID NO: 60330 - DNA, 22 bp, synthetic construct
  misc_feature 1..22: note = chemically synthesized
  source 1..22: mol_type = other DNA
agaatatgagatctgagtcaag

SEQ ID NO: 60331 - DNA, 22 bp, synthetic construct
  misc_feature 1..22: note = chemically synthesized
  source 1..22: mol_type = other DNA
agtcaagtcttcaaggatgtga

SEQ ID NO: 60332 - DNA, 22 bp, synthetic construct
  misc_feature 1..22: note = chemically synthesized
  source 1..22: mol_type = other DNA
caaggatgtgaggaagtaagtt

SEQ ID NO: 60333 - DNA, 22 bp, synthetic construct
  misc_feature 1..22: note = chemically synthesized
  source 1..22: mol_type = other DNA
aaggatgtgaggaagtaagttt

SEQ ID NO: 60334 - DNA, 22 bp, synthetic construct
  misc_feature 1..22: note = chemically synthesized
  source 1..22: mol_type = other DNA
ctggcagaagagctgtgaaggg

SEQ ID NO: 60335 - DNA, 22 bp, synthetic construct
  misc_feature 1..22: note = chemically synthesized
  source 1..22: mol_type = other DNA
tggcagaagagctgtgaagggc

SEQ ID NO: 60336 - DNA, 22 bp, synthetic construct
  misc_feature 1..22: note = chemically synthesized
  source 1..22: mol_type = other DNA
gcagaagagctgtgaagggctg

SEQ ID NO: 60337 - DNA, 22 bp, synthetic construct
  misc_feature 1..22: note = chemically synthesized
  source 1..22: mol_type = other DNA
tgaagggctgtctggccagaga

SEQ ID NO: 60338 - DNA, 22 bp, synthetic construct
  misc_feature 1..22: note = chemically synthesized
  source 1..22: mol_type = other DNA
tctggccagagaagattgcaat

SEQ ID NO: 60339 - DNA, 22 bp, synthetic construct
  misc_feature 1..22: note = chemically synthesized
  source 1..22: mol_type = other DNA
gccagagaagattgcaatgcaa

SEQ ID NO: 60340 - DNA, 22 bp, synthetic construct
  misc_feature 1..22: note = chemically synthesized
  source 1..22: mol_type = other DNA
caatgcaaaagccctgaggtgg

SEQ ID NO: 60341 - DNA, 22 bp, synthetic construct
  misc_feature 1..22: note = chemically synthesized
  source 1..22: mol_type = other DNA
aggtgggaacgtgtttggtgtg

SEQ ID NO: 60342 - DNA, 22 bp, synthetic construct
  misc_feature 1..22: note = chemically synthesized
  source 1..22: mol_type = other DNA
ggtgtgtttaaaggaaagcaat

SEQ ID NO: 60343 - DNA, 22 bp, synthetic construct
  misc_feature 1..22: note = chemically synthesized
  source 1..22: mol_type = other DNA
gtgtgtttaaaggaaagcaatg

SEQ ID NO: 60344 - DNA, 22 bp, synthetic construct
  misc_feature 1..22: note = chemically synthesized
  source 1..22: mol_type = other DNA
aaaggaaagcaatgaggccagt

SEQ ID NO: 60345 - DNA, 22 bp, synthetic construct
  misc_feature 1..22: note = chemically synthesized
  source 1..22: mol_type = other DNA
aaggaaagcaatgaggccagtg

SEQ ID NO: 60346 - DNA, 22 bp, synthetic construct
  misc_feature 1..22: note = chemically synthesized
  source 1..22: mol_type = other DNA
gtaattgtacgcccagtatgct

SEQ ID NO: 60347 - DNA, 22 bp, synthetic construct
  misc_feature 1..22: note = chemically synthesized
  source 1..22: mol_type = other DNA
taattgtacgcccagtatgctg

SEQ ID NO: 60348 - DNA, 22 bp, synthetic construct
  misc_feature 1..22: note = chemically synthesized
  source 1..22: mol_type = other DNA
tacgcccagtatgctgattctt

SEQ ID NO: 60349 - DNA, 22 bp, synthetic construct
  misc_feature 1..22: note = chemically synthesized
  source 1..22: mol_type = other DNA
attctttgtgtaatctccagac

SEQ ID NO: 60350 - DNA, 22 bp, synthetic construct
  misc_feature 1..22: note = chemically synthesized
  source 1..22: mol_type = other DNA
tttgtgtaatctccagactgta

SEQ ID NO: 60351 - DNA, 22 bp, synthetic construct
  misc_feature 1..22: note = chemically synthesized
  source 1..22: mol_type = other DNA
tgtgtaatctccagactgtatt

SEQ ID NO: 60352 - DNA, 22 bp, synthetic construct
  misc_feature 1..22: note = chemically synthesized
  source 1..22: mol_type = other DNA
gtgtaatctccagactgtatta

SEQ ID NO: 60353 - DNA, 22 bp, synthetic construct
  misc_feature 1..22: note = chemically synthesized
  source 1..22: mol_type = other DNA
tgtaatctccagactgtattaa

SEQ ID NO: 60354 - DNA, 22 bp, synthetic construct
  misc_feature 1..22: note = chemically synthesized
  source 1..22: mol_type = other DNA
cagactgtattaaactgcaaga

SEQ ID NO: 60355 - DNA, 22 bp, synthetic construct
  misc_feature 1..22: note = chemically synthesized
  source 1..22: mol_type = other DNA
tattaaactgcaagagcagggc

SEQ ID NO: 60356 - DNA, 22 bp, synthetic construct
  misc_feature 1..22: note = chemically synthesized
  source 1..22: mol_type = other DNA
aactgcaagagcagggcccctc

SEQ ID NO: 60357 - DNA, 22 bp, synthetic construct
  misc_feature 1..22: note = chemically synthesized
  source 1..22: mol_type = other DNA
caagagcagggcccctctctgg

SEQ ID NO: 60358 - DNA, 22 bp, synthetic construct
  misc_feature 1..22: note = chemically synthesized
  source 1..22: mol_type = other DNA
tctggctttgctcatcattgta

SEQ ID NO: 60359 - DNA, 22 bp, synthetic construct
  misc_feature 1..22: note = chemically synthesized
  source 1..22: mol_type = other DNA
tggctttgctcatcattgtatt

SEQ ID NO: 60360 - DNA, 22 bp, synthetic construct
  misc_feature 1..22: note = chemically synthesized
  source 1..22: mol_type = other DNA
gctttgctcatcattgtattcc

SEQ ID NO: 60361 - DNA, 22 bp, synthetic construct
  misc_feature 1..22: note = chemically synthesized
  source 1..22: mol_type = other DNA
tgctcatcattgtattcccaga

SEQ ID NO: 60362 - DNA, 22 bp, synthetic construct
  misc_feature 1..22: note = chemically synthesized
  source 1..22: mol_type = other DNA
gctcatcattgtattcccagag

SEQ ID NO: 60363 - DNA, 22 bp, synthetic construct
  misc_feature 1..22: note = chemically synthesized
  source 1..22: mol_type = other DNA
ctcatcattgtattcccagagc

SEQ ID NO: 60364 - DNA, 22 bp, synthetic construct
  misc_feature 1..22: note = chemically synthesized
  source 1..22: mol_type = other DNA
atcattgtattcccagagcctt

SEQ ID NO: 60365 - DNA, 22 bp, synthetic construct
  misc_feature 1..22: note = chemically synthesized
  source 1..22: mol_type = other DNA
tattcccagagccttgcacaat

SEQ ID NO: 60366 - DNA, 22 bp, synthetic construct
  misc_feature 1..22: note = chemically synthesized
  source 1..22: mol_type = other DNA
ccagagccttgcacaatgcttg

SEQ ID NO: 60367 - DNA, 22 bp, synthetic construct
  misc_feature 1..22: note = chemically synthesized
  source 1..22: mol_type = other DNA
gcacaatgcttggtgcatagga

SEQ ID NO: 60368 - DNA, 22 bp, synthetic construct
  misc_feature 1..22: note = chemically synthesized
  source 1..22: mol_type = other DNA
cacaatgcttggtgcataggag

SEQ ID NO: 60369 - DNA, 22 bp, synthetic construct
  misc_feature 1..22: note = chemically synthesized
  source 1..22: mol_type = other DNA
ggtgcataggagatggaaattt

SEQ ID NO: 60370 - DNA, 22 bp, synthetic construct
  misc_feature 1..22: note = chemically synthesized
  source 1..22: mol_type = other DNA
gtgcataggagatggaaatttg

SEQ ID NO: 60371 - DNA, 22 bp, synthetic construct
  misc_feature 1..22: note = chemically synthesized
  source 1..22: mol_type = other DNA
gttaaataaatgaattatggat

SEQ ID NO: 60372 - DNA, 22 bp, synthetic construct
  misc_feature 1..22: note = chemically synthesized
  source 1..22: mol_type = other DNA
ttaaataaatgaattatggata

SEQ ID NO: 60373 - DNA, 22 bp, synthetic construct
  misc_feature 1..22: note = chemically synthesized
  source 1..22: mol_type = other DNA
aataaatgaattatggataacg

SEQ ID NO: 60374 - DNA, 22 bp, synthetic construct
  misc_feature 1..22: note = chemically synthesized
  source 1..22: mol_type = other DNA
tggataacgaatggatggtaag

SEQ ID NO: 60375 - DNA, 22 bp, synthetic construct
  misc_feature 1..22: note = chemically synthesized
  source 1..22: mol_type = other DNA
ggtggctgggtagatgatgcac

SEQ ID NO: 60376 - DNA, 22 bp, synthetic construct
  misc_feature 1..22: note = chemically synthesized
  source 1..22: mol_type = other DNA
ggtagatgatgcactgtctccc

SEQ ID NO: 60377 - DNA, 22 bp, synthetic construct
  misc_feature 1..22: note = chemically synthesized
  source 1..22: mol_type = other DNA
tctcccagatgaggaccttttc

SEQ ID NO: 60378 - DNA, 22 bp, synthetic construct
  misc_feature 1..22: note = chemically synthesized
  source 1..22: mol_type = other DNA
ccagatgaggaccttttcacct

SEQ ID NO: 60379 - DNA, 22 bp, synthetic construct
  misc_feature 1..22: note = chemically synthesized
  source 1..22: mol_type = other DNA
ttcacctttactccattctctt

SEQ ID NO: 60380 - DNA, 22 bp, synthetic construct
  misc_feature 1..22: note = chemically synthesized
  source 1..22: mol_type = other DNA
tcacctttactccattctcttt

SEQ ID NO: 60381 - DNA, 22 bp, synthetic construct
  misc_feature 1..22: note = chemically synthesized
  source 1..22: mol_type = other DNA
cacctttactccattctctttc

SEQ ID NO: 60382 - DNA, 22 bp, synthetic construct
  misc_feature 1..22: note = chemically synthesized
  source 1..22: mol_type = other DNA
acctttactccattctctttcc

SEQ ID NO: 60383 - DNA, 22 bp, synthetic construct
  misc_feature 1..22: note = chemically synthesized
  source 1..22: mol_type = other DNA
tactccattctctttcctgccc

SEQ ID NO: 60384 - DNA, 22 bp, synthetic construct
  misc_feature 1..22: note = chemically synthesized
  source 1..22: mol_type = other DNA
actccattctctttcctgccct

SEQ ID NO: 60385 - DNA, 22 bp, synthetic construct
  misc_feature 1..22: note = chemically synthesized
  source 1..22: mol_type = other DNA
ctccattctctttcctgccctt

SEQ ID NO: 60386 - DNA, 22 bp, synthetic construct
  misc_feature 1..22: note = chemically synthesized
  source 1..22: mol_type = other DNA
cattctctttcctgccctttag

SEQ ID NO: 60387 - DNA, 22 bp, synthetic construct
  misc_feature 1..22: note = chemically synthesized
  source 1..22: mol_type = other DNA
tctttcctgccctttagggagc

SEQ ID NO: 60388 - DNA, 22 bp, synthetic construct
  misc_feature 1..22: note = chemically synthesized
  source 1..22: mol_type = other DNA
tttcctgccctttagggagccc

SEQ ID NO: 60389 - DNA, 22 bp, synthetic construct
  misc_feature 1..22: note = chemically synthesized
  source 1..22: mol_type = other DNA
tcctgccctttagggagcccct

SEQ ID NO: 60390 - DNA, 22 bp, synthetic construct
  misc_feature 1..22: note = chemically synthesized
  source 1..22: mol_type = other DNA
cctgccctttagggagcccctc

SEQ ID NO: 60391 - DNA, 22 bp, synthetic construct
  misc_feature 1..22: note = chemically synthesized
  source 1..22: mol_type = other DNA
ctgccctttagggagcccctct

SEQ ID NO: 60392 - DNA, 22 bp, synthetic construct
  misc_feature 1..22: note = chemically synthesized
  source 1..22: mol_type = other DNA
ccctttagggagcccctctggc

SEQ ID NO: 60393 - DNA, 22 bp, synthetic construct
  misc_feature 1..22: note = chemically synthesized
  source 1..22: mol_type = other DNA
tagggagcccctctggccatgc

SEQ ID NO: 60394 - DNA, 22 bp, synthetic construct
  misc_feature 1..22: note = chemically synthesized
  source 1..22: mol_type = other DNA
agggagcccctctggccatgcc

SEQ ID NO: 60395 - DNA, 22 bp, synthetic construct
  misc_feature 1..22: note = chemically synthesized
  source 1..22: mol_type = other DNA
gggagcccctctggccatgcca

SEQ ID NO: 60396 - DNA, 22 bp, synthetic construct
  misc_feature 1..22: note = chemically synthesized
  source 1..22: mol_type = other DNA
tggccatgccatgggcacagca

SEQ ID NO: 60397 - DNA, 22 bp, synthetic construct
  misc_feature 1..22: note = chemically synthesized
  source 1..22: mol_type = other DNA
gccatgccatgggcacagcagg

SEQ ID NO: 60398 - DNA, 22 bp, synthetic construct
  misc_feature 1..22: note = chemically synthesized
  source 1..22: mol_type = other DNA
cgtgatggtcacatctactctt

SEQ ID NO: 60399 - DNA, 22 bp, synthetic construct
  misc_feature 1..22: note = chemically synthesized
  source 1..22: mol_type = other DNA
ctctttccatctttcagggaaa

SEQ ID NO: 60400 - DNA, 22 bp, synthetic construct
  misc_feature 1..22: note = chemically synthesized
  source 1..22: mol_type = other DNA
tttccatctttcagggaaagat

SEQ ID NO: 60401 - DNA, 22 bp, synthetic construct
  misc_feature 1..22: note = chemically synthesized
  source 1..22: mol_type = other DNA
tccatctttcagggaaagataa

SEQ ID NO: 60402 - DNA, 22 bp, synthetic construct
  misc_feature 1..22: note = chemically synthesized
  source 1..22: mol_type = other DNA
ccatctttcagggaaagataaa

SEQ ID NO: 60403 - DNA, 22 bp, synthetic construct
  misc_feature 1..22: note = chemically synthesized
  source 1..22: mol_type = other DNA
catctttcagggaaagataaag

SEQ ID NO: 60404 - DNA, 22 bp, synthetic construct
  misc_feature 1..22: note = chemically synthesized
  source 1..22: mol_type = other DNA
tcagggaaagataaagccgacc

SEQ ID NO: 60405 - DNA, 22 bp, synthetic construct
  misc_feature 1..22: note = chemically synthesized
  source 1..22: mol_type = other DNA
cagggaaagataaagccgacct

SEQ ID NO: 60406 - DNA, 22 bp, synthetic construct
  misc_feature 1..22: note = chemically synthesized
  source 1..22: mol_type = other DNA
agggaaagataaagccgaccta

SEQ ID NO: 60407 - DNA, 22 bp, synthetic construct
  misc_feature 1..22: note = chemically synthesized
  source 1..22: mol_type = other DNA
cagatttcggtaagaactcacc

SEQ ID NO: 60408 - DNA, 22 bp, synthetic construct
  misc_feature 1..22: note = chemically synthesized
  source 1..22: mol_type = other DNA
cggtaagaactcaccactgggg

SEQ ID NO: 60409 - DNA, 22 bp, synthetic construct
  misc_feature 1..22: note = chemically synthesized
  source 1..22: mol_type = other DNA
ggtaagaactcaccactggggt

SEQ ID NO: 60410 - DNA, 22 bp, synthetic construct
  misc_feature 1..22: note = chemically synthesized
  source 1..22: mol_type = other DNA
accactggggtgtaggtggtgg

SEQ ID NO: 60411 - DNA, 22 bp, synthetic construct
  misc_feature 1..22: note = chemically synthesized
  source 1..22: mol_type = other DNA
gggtgtaggtggtggagggcag

SEQ ID NO: 60412 - DNA, 22 bp, synthetic construct
  misc_feature 1..22: note = chemically synthesized
  source 1..22: mol_type = other DNA
tctctgtagctgacacaccacg

SEQ ID NO: 60413 - DNA, 22 bp, synthetic construct
  misc_feature 1..22: note = chemically synthesized
  source 1..22: mol_type = other DNA
tctgtagctgacacaccacgta

SEQ ID NO: 60414 - DNA, 22 bp, synthetic construct
  misc_feature 1..22: note = chemically synthesized
  source 1..22: mol_type = other DNA
tgtagctgacacaccacgtatt

SEQ ID NO: 60415 - DNA, 22 bp, synthetic construct
  misc_feature 1..22: note = chemically synthesized
  source 1..22: mol_type = other DNA
tagctgacacaccacgtattct

SEQ ID NO: 60416 - DNA, 22 bp, synthetic construct
  misc_feature 1..22: note = chemically synthesized
  source 1..22: mol_type = other DNA
acacaccacgtattcttcctca

SEQ ID NO: 60417 - DNA, 22 bp, synthetic construct
  misc_feature 1..22: note = chemically synthesized
  source 1..22: mol_type = other DNA
ttcctcacatccccctagcccg

SEQ ID NO: 60418 - DNA, 22 bp, synthetic construct
  misc_feature 1..22: note = chemically synthesized
  source 1..22: mol_type = other DNA
cctcacatccccctagcccgct

SEQ ID NO: 60419 - DNA, 22 bp, synthetic construct
  misc_feature 1..22: note = chemically synthesized
  source 1..22: mol_type = other DNA
ctcacatccccctagcccgctc

SEQ ID NO: 60420 - DNA, 22 bp, synthetic construct
  misc_feature 1..22: note = chemically synthesized
  source 1..22: mol_type = other DNA
acatccccctagcccgctccca

SEQ ID NO: 60421 - DNA, 22 bp, synthetic construct
  misc_feature 1..22: note = chemically synthesized
  source 1..22: mol_type = other DNA
gcccgctcccacacctgggcag

SEQ ID NO: 60422 - DNA, 22 bp, synthetic construct
  misc_feature 1..22: note = chemically synthesized
  source 1..22: mol_type = other DNA
ccacacctgggcagccgctgat

SEQ ID NO: 60423 - DNA, 22 bp, synthetic construct
  misc_feature 1..22: note = chemically synthesized
  source 1..22: mol_type = other DNA
ggcagccgctgattaagagttg

SEQ ID NO: 60424 - DNA, 22 bp, synthetic construct
  misc_feature 1..22: note = chemically synthesized
  source 1..22: mol_type = other DNA
attaagagttgtggcactttgg

SEQ ID NO: 60425 - DNA, 22 bp, synthetic construct
  misc_feature 1..22: note = chemically synthesized
  source 1..22: mol_type = other DNA
agagttgtggcactttggatag

SEQ ID NO: 60426 - DNA, 22 bp, synthetic construct
  misc_feature 1..22: note = chemically synthesized
  source 1..22: mol_type = other DNA
tggcactttggatagggataaa

SEQ ID NO: 60427 - DNA, 22 bp, synthetic construct
  misc_feature 1..22: note = chemically synthesized
  source 1..22: mol_type = other DNA
tggatagggataaacctcagag

SEQ ID NO: 60428 - DNA, 22 bp, synthetic construct
  misc_feature 1..22: note = chemically synthesized
  source 1..22: mol_type = other DNA
ggatagggataaacctcagagt

SEQ ID NO: 60429 - DNA, 22 bp, synthetic construct
  misc_feature 1..22: note = chemically synthesized
  source 1..22: mol_type = other DNA
gatagggataaacctcagagtc

SEQ ID NO: 60430 - DNA, 22 bp, synthetic construct
  misc_feature 1..22: note = chemically synthesized
  source 1..22: mol_type = other DNA
agagtcagggaatgtttgggct

SEQ ID NO: 60431 - DNA, 22 bp, synthetic construct
  misc_feature 1..22: note = chemically synthesized
  source 1..22: mol_type = other DNA
gggctgaaagggatccagtagt

SEQ ID NO: 60432 - DNA, 22 bp, synthetic construct
  misc_feature 1..22: note = chemically synthesized
  source 1..22: mol_type = other DNA
ggctgaaagggatccagtagtg

SEQ ID NO: 60433 - DNA, 22 bp, synthetic construct
  misc_feature 1..22: note = chemically synthesized
  source 1..22: mol_type = other DNA
aaagggatccagtagtgcaatc

SEQ ID NO: 60434 - DNA, 22 bp, synthetic construct
  misc_feature 1..22: note = chemically synthesized
  source 1..22: mol_type = other DNA
ttttacagataaggaaacaaag

SEQ ID NO: 60435 - DNA, 22 bp, synthetic construct
  misc_feature 1..22: note = chemically synthesized
  source 1..22: mol_type = other DNA
tacagataaggaaacaaagccc

SEQ ID NO: 60436 - DNA, 22 bp, synthetic construct
  misc_feature 1..22: note = chemically synthesized
  source 1..22: mol_type = other DNA
acagataaggaaacaaagccca

SEQ ID NO: 60437 - DNA, 22 bp, synthetic construct
  misc_feature 1..22: note = chemically synthesized
  source 1..22: mol_type = other DNA
cagataaggaaacaaagcccaa

SEQ ID NO: 60438 - DNA, 22 bp, synthetic construct
  misc_feature 1..22: note = chemically synthesized
  source 1..22: mol_type = other DNA
ataaaaataaggtagtgaagta

SEQ ID NO: 60439 - DNA, 22 bp, synthetic construct
  misc_feature 1..22: note = chemically synthesized
  source 1..22: mol_type = other DNA
taaaaataaggtagtgaagtag

SEQ ID NO: 60440 - DNA, 22 bp, synthetic construct
  misc_feature 1..22: note = chemically synthesized
  source 1..22: mol_type = other DNA
aaataaaaacccatgtctgtac

SEQ ID NO: 60441 - DNA, 22 bp, synthetic construct
  misc_feature 1..22: note = chemically synthesized
  source 1..22: mol_type = other DNA
aataaaaacccatgtctgtacc

SEQ ID NO: 60442 - DNA, 22 bp, synthetic construct
  misc_feature 1..22: note = chemically synthesized
  source 1..22: mol_type = other DNA
taccaaccacagagtcacccat

SEQ ID NO: 60443 - DNA, 22 bp, synthetic construct
  misc_feature 1..22: note = chemically synthesized
  source 1..22: mol_type = other DNA
aaataaccagagaaacagaaga

SEQ ID NO: 60444 - DNA, 22 bp, synthetic construct
  misc_feature 1..22: note = chemically synthesized
  source 1..22: mol_type = other DNA
ctactacagagaattccgggtg

SEQ ID NO: 60445 - DNA, 22 bp, synthetic construct
  misc_feature 1..22: note = chemically synthesized
  source 1..22: mol_type = other DNA
ctacagagaattccgggtgtgc

SEQ ID NO: 60446 - DNA, 22 bp, synthetic construct
  misc_feature 1..22: note = chemically synthesized
  source 1..22: mol_type = other DNA
cagagaattccgggtgtgcagc

SEQ ID NO: 60447 - DNA, 22 bp, synthetic construct
  misc_feature 1..22: note = chemically synthesized
  source 1..22: mol_type = other DNA
cgggtgtgcagccacagtgcaa

SEQ ID NO: 60448 - DNA, 22 bp, synthetic construct
  misc_feature 1..22: note = chemically synthesized
  source 1..22: mol_type = other DNA
tttatttttatttttgagatgc

SEQ ID NO: 60449 - DNA, 22 bp, synthetic construct
  misc_feature 1..22: note = chemically synthesized
  source 1..22: mol_type = other DNA
ttatttttatttttgagatgca

SEQ ID NO: 60450 - DNA, 22 bp, synthetic construct
  misc_feature 1..22: note = chemically synthesized
  source 1..22: mol_type = other DNA
tatttttatttttgagatgcag

SEQ ID NO: 60451 - DNA, 22 bp, synthetic construct
  misc_feature 1..22: note = chemically synthesized
  source 1..22: mol_type = other DNA
atttttatttttgagatgcagt

SEQ ID NO: 60452 - DNA, 22 bp, synthetic construct
  misc_feature 1..22: note = chemically synthesized
  source 1..22: mol_type = other DNA
tttttatttttgagatgcagtc

SEQ ID NO: 60453 - DNA, 22 bp, synthetic construct
  misc_feature 1..22: note = chemically synthesized
  source 1..22: mol_type = other DNA
ttatttttgagatgcagtctcg

SEQ ID NO: 60454 - DNA, 22 bp, synthetic construct
  misc_feature 1..22: note = chemically synthesized
  source 1..22: mol_type = other DNA
tatttttgagatgcagtctcgc

SEQ ID NO: 60455 - DNA, 22 bp, synthetic construct
  misc_feature 1..22: note = chemically synthesized
  source 1..22: mol_type = other DNA
atttttgagatgcagtctcgct

SEQ ID NO: 60456 - DNA, 22 bp, synthetic construct
  misc_feature 1..22: note = chemically synthesized
  source 1..22: mol_type = other DNA
tttttgagatgcagtctcgctc

SEQ ID NO: 60457 - DNA, 22 bp, synthetic construct
  misc_feature 1..22: note = chemically synthesized
  source 1..22: mol_type = other DNA
ttgagatgcagtctcgctctgt

SEQ ID NO: 60458 - DNA, 22 bp, synthetic construct
  misc_feature 1..22: note = chemically synthesized
  source 1..22: mol_type = other DNA
tgagatgcagtctcgctctgtc

SEQ ID NO: 60459 - DNA, 22 bp, synthetic construct
  misc_feature 1..22: note = chemically synthesized
  source 1..22: mol_type = other DNA
gagatgcagtctcgctctgtca

SEQ ID NO: 60460 - DNA, 22 bp, synthetic construct
  misc_feature 1..22: note = chemically synthesized
  source 1..22: mol_type = other DNA
agatgcagtctcgctctgtcat

SEQ ID NO: 60461 - DNA, 22 bp, synthetic construct
  misc_feature 1..22: note = chemically synthesized
  source 1..22: mol_type = other DNA
gctctgtcatccaggctgaagt

SEQ ID NO: 60462 - DNA, 22 bp, synthetic construct
  misc_feature 1..22: note = chemically synthesized
  source 1..22: mol_type = other DNA
tgtcatccaggctgaagtgcag

SEQ ID NO: 60463 - DNA, 22 bp, synthetic construct
  misc_feature 1..22: note = chemically synthesized
  source 1..22: mol_type = other DNA
tcatccaggctgaagtgcagtg

SEQ ID NO: 60464 - DNA, 22 bp, synthetic construct
  misc_feature 1..22: note = chemically synthesized
  source 1..22: mol_type = other DNA
aagtgcagtggcacgatcatgt

SEQ ID NO: 60465 - DNA, 22 bp, synthetic construct
  misc_feature 1..22: note = chemically synthesized
  source 1..22: mol_type = other DNA
gctgcaacctctgcctcccagg

SEQ ID NO: 60466 - DNA, 22 bp, synthetic construct
  misc_feature 1..22: note = chemically synthesized
  source 1..22: mol_type = other DNA
caacctctgcctcccaggctca

SEQ ID NO: 60467 - DNA, 22 bp, synthetic construct
  misc_feature 1..22: note = chemically synthesized
  source 1..22: mol_type = other DNA
tgcctcccaggctcaagcgatc

SEQ ID NO: 60468 - DNA, 22 bp, synthetic construct
  misc_feature 1..22: note = chemically synthesized
  source 1..22: mol_type = other DNA
cctcccaggctcaagcgatcct

SEQ ID NO: 60469 - DNA, 22 bp, synthetic construct
  misc_feature 1..22: note = chemically synthesized
  source 1..22: mol_type = other DNA
ccaggctcaagcgatcctccca

SEQ ID NO: 60470 - DNA, 22 bp, synthetic construct
  misc_feature 1..22: note = chemically synthesized
  source 1..22: mol_type = other DNA
aagcgatcctcccacctcagcc

SEQ ID NO: 60471 - DNA, 22 bp, synthetic construct
  misc_feature 1..22: note = chemically synthesized
  source 1..22: mol_type = other DNA
ccacctcagccatctgagtagc

SEQ ID NO: 60472 - DNA, 22 bp, synthetic construct
  misc_feature 1..22: note = chemically synthesized
  source 1..22: mol_type = other DNA
agccatctgagtagctgggacc

SEQ ID NO: 60473 - DNA, 22 bp, synthetic construct
  misc_feature 1..22: note = chemically synthesized
  source 1..22: mol_type = other DNA
agtagctgggaccacaggccac

SEQ ID NO: 60474 - DNA, 22 bp, synthetic construct
  misc_feature 1..22: note = chemically synthesized
  source 1..22: mol_type = other DNA
ggaccacaggccacacaccaca

SEQ ID NO: 60475 - DNA, 22 bp, synthetic construct
  misc_feature 1..22: note = chemically synthesized
  source 1..22: mol_type = other DNA
atttctcgtatctttttgtaga

SEQ ID NO: 60476 - DNA, 22 bp, synthetic construct
  misc_feature 1..22: note = chemically synthesized
  source 1..22: mol_type = other DNA
ctcgtatctttttgtagagaca

SEQ ID NO: 60477 - DNA, 22 bp, synthetic construct
  misc_feature 1..22: note = chemically synthesized
  source 1..22: mol_type = other DNA
tcgtatctttttgtagagacag

SEQ ID NO: 60478 - DNA, 22 bp, synthetic construct
  misc_feature 1..22: note = chemically synthesized
  source 1..22: mol_type = other DNA
gtatctttttgtagagacagag

SEQ ID NO: 60479 - DNA, 22 bp, synthetic construct
  misc_feature 1..22: note = chemically synthesized
  source 1..22: mol_type = other DNA
tttgtagagacagagttctgct

SEQ ID NO: 60480 - DNA, 22 bp, synthetic construct
  misc_feature 1..22: note = chemically synthesized
  source 1..22: mol_type = other DNA
ttgtagagacagagttctgcta

SEQ ID NO: 60481 - DNA, 22 bp, synthetic construct
  misc_feature 1..22: note = chemically synthesized
  source 1..22: mol_type = other DNA
tgtagagacagagttctgctat

SEQ ID NO: 60482 - DNA, 22 bp, synthetic construct
  misc_feature 1..22: note = chemically synthesized
  source 1..22: mol_type = other DNA
gtagagacagagttctgctatg

SEQ ID NO: 60483 - DNA, 22 bp, synthetic construct
  misc_feature 1..22: note = chemically synthesized
  source 1..22: mol_type = other DNA
tagagacagagttctgctatgt

SEQ ID NO: 60484 - DNA, 22 bp, synthetic construct
  misc_feature 1..22: note = chemically synthesized
  source 1..22: mol_type = other DNA
tgctatgttgcccaggctcagg

SEQ ID NO: 60485 - DNA, 22 bp, synthetic construct
  misc_feature 1..22: note = chemically synthesized
  source 1..22: mol_type = other DNA
ctatgttgcccaggctcaggct

SEQ ID NO: 60486 - DNA, 22 bp, synthetic construct
  misc_feature 1..22: note = chemically synthesized
  source 1..22: mol_type = other DNA
tgttgcccaggctcaggctggt

SEQ ID NO: 60487 - DNA, 22 bp, synthetic construct
  misc_feature 1..22: note = chemically synthesized
  source 1..22: mol_type = other DNA
cccaggctcaggctggtcttga

SEQ ID NO: 60488 - DNA, 22 bp, synthetic construct
  misc_feature 1..22: note = chemically synthesized
  source 1..22: mol_type = other DNA
aggctggtcttgatctcaagca

SEQ ID NO: 60489 - DNA, 22 bp, synthetic construct
  misc_feature 1..22: note = chemically synthesized
  source 1..22: mol_type = other DNA
gtcttgatctcaagcaattggc

SEQ ID NO: 60490 - DNA, 22 bp, synthetic construct
  misc_feature 1..22: note = chemically synthesized
  source 1..22: mol_type = other DNA
gatctcaagcaattggcttgcc

SEQ ID NO: 60491 - DNA, 22 bp, synthetic construct
  misc_feature 1..22: note = chemically synthesized
  source 1..22: mol_type = other DNA
atctcaagcaattggcttgcct

SEQ ID NO: 60492 - DNA, 22 bp, synthetic construct
  misc_feature 1..22: note = chemically synthesized
  source 1..22: mol_type = other DNA
aagcaattggcttgcctcagcc

SEQ ID NO: 60493 - DNA, 22 bp, synthetic construct
  misc_feature 1..22: note = chemically synthesized
  source 1..22: mol_type = other DNA
gcttgcctcagcctcctaaaat

SEQ ID NO: 60494 - DNA, 22 bp, synthetic construct
  misc_feature 1..22: note = chemically synthesized
  source 1..22: mol_type = other DNA
gcctcagcctcctaaaatattg

SEQ ID NO: 60495 - DNA, 22 bp, synthetic construct
  misc_feature 1..22: note = chemically synthesized
  source 1..22: mol_type = other DNA
cctcagcctcctaaaatattgg

SEQ ID NO: 60496 - DNA, 22 bp, synthetic construct
  misc_feature 1..22: note = chemically synthesized
  source 1..22: mol_type = other DNA
agcctcctaaaatattgggatt

SEQ ID NO: 60497 - DNA, 22 bp, synthetic construct
  misc_feature 1..22: note = chemically synthesized
  source 1..22: mol_type = other DNA
ctaaaatattgggattacaggc

SEQ ID NO: 60498 - DNA, 22 bp, synthetic construct
  misc_feature 1..22: note = chemically synthesized
  source 1..22: mol_type = other DNA
aaatattgggattacaggcatg

SEQ ID NO: 60499 - DNA, 22 bp, synthetic construct
  misc_feature 1..22: note = chemically synthesized
  source 1..22: mol_type = other DNA
ggattacaggcatgagccaccg

SEQ ID NO: 60500 - DNA, 22 bp, synthetic construct
  misc_feature 1..22: note = chemically synthesized
  source 1..22: mol_type = other DNA
caggcatgagccaccgcgccag

SEQ ID NO: 60501 - DNA, 22 bp, synthetic construct
  misc_feature 1..22: note = chemically synthesized
  source 1..22: mol_type = other DNA
aattatcaaacagataaaatag

SEQ ID NO: 60502 - DNA, 22 bp, synthetic construct
  misc_feature 1..22: note = chemically synthesized
  source 1..22: mol_type = other DNA
attatcaaacagataaaatagg

SEQ ID NO: 60503 - DNA, 22 bp, synthetic construct
  misc_feature 1..22: note = chemically synthesized
  source 1..22: mol_type = other DNA
tcaaacagataaaatagggaag

SEQ ID NO: 60504 - DNA, 22 bp, synthetic construct
  misc_feature 1..22: note = chemically synthesized
  source 1..22: mol_type = other DNA
aaattcatatacacaagggtta

SEQ ID NO: 60505 - DNA, 22 bp, synthetic construct
  misc_feature 1..22: note = chemically synthesized
  source 1..22: mol_type = other DNA
atatacacaagggttaaccact

SEQ ID NO: 60506 - DNA, 22 bp, synthetic construct
  misc_feature 1..22: note = chemically synthesized
  source 1..22: mol_type = other DNA
accacttgccacaggcattttt

SEQ ID NO: 60507 - DNA, 22 bp, synthetic construct
  misc_feature 1..22: note = chemically synthesized
  source 1..22: mol_type = other DNA
gccacaggcatttttttttttt

SEQ ID NO: 60508 - DNA, 22 bp, synthetic construct
  misc_feature 1..22: note = chemically synthesized
  source 1..22: mol_type = other DNA
ccacaggcattttttttttttt

SEQ ID NO: 60509 - DNA, 22 bp, synthetic construct
  misc_feature 1..22: note = chemically synthesized
  source 1..22: mol_type = other DNA
tttttttttttttgagacggaa

SEQ ID NO: 60510 - DNA, 22 bp, synthetic construct
  misc_feature 1..22: note = chemically synthesized
  source 1..22: mol_type = other DNA
ttttttttttttgagacggaat

SEQ ID NO: 60511 - DNA, 22 bp, synthetic construct
  misc_feature 1..22: note = chemically synthesized
  source 1..22: mol_type = other DNA
tttttttttttgagacggaatc

SEQ ID NO: 60512 - DNA, 22 bp, synthetic construct
  misc_feature 1..22: note = chemically synthesized
  source 1..22: mol_type = other DNA
ttttttttttgagacggaatct

SEQ ID NO: 60513 - DNA, 22 bp, synthetic construct
  misc_feature 1..22: note = chemically synthesized
  source 1..22: mol_type = other DNA
tttttttttgagacggaatctc

SEQ ID NO: 60514 - DNA, 22 bp, synthetic construct
  misc_feature 1..22: note = chemically synthesized
  source 1..22: mol_type = other DNA
ttttttttgagacggaatctcg

SEQ ID NO: 60515 - DNA, 22 bp, synthetic construct
  misc_feature 1..22: note = chemically synthesized
  source 1..22: mol_type = other DNA
tttttttgagacggaatctcgc

SEQ ID NO: 60516 - DNA, 22 bp, synthetic construct
  misc_feature 1..22: note = chemically synthesized
  source 1..22: mol_type = other DNA
ttttttgagacggaatctcgct

SEQ ID NO: 60517 - DNA, 22 bp, synthetic construct
  misc_feature 1..22: note = chemically synthesized
  source 1..22: mol_type = other DNA
tttttgagacggaatctcgctc

SEQ ID NO: 60518 - DNA, 22 bp, synthetic construct
  misc_feature 1..22: note = chemically synthesized
  source 1..22: mol_type = other DNA
ttttgagacggaatctcgctct

SEQ ID NO: 60519 - DNA, 22 bp, synthetic construct
  misc_feature 1..22: note = chemically synthesized
  source 1..22: mol_type = other DNA
tttgagacggaatctcgctctg

SEQ ID NO: 60520 - DNA, 22 bp, synthetic construct
  misc_feature 1..22: note = chemically synthesized
  source 1..22: mol_type = other DNA
ttgagacggaatctcgctctgt

SEQ ID NO: 60521 - DNA, 22 bp, synthetic construct
  misc_feature 1..22: note = chemically synthesized
  source 1..22: mol_type = other DNA
tgagacggaatctcgctctgtt

SEQ ID NO: 60522 - DNA, 22 bp, synthetic construct
  misc_feature 1..22: note = chemically synthesized
  source 1..22: mol_type = other DNA
gagacggaatctcgctctgttg

SEQ ID NO: 60523 - DNA, 22 bp, synthetic construct
  misc_feature 1..22: note = chemically synthesized
  source 1..22: mol_type = other DNA
agacggaatctcgctctgttgc

SEQ ID NO: 60524 - DNA, 22 bp, synthetic construct
  misc_feature 1..22: note = chemically synthesized
  source 1..22: mol_type = other DNA
gctctgttgcccaggctggagt

SEQ ID NO: 60525 - DNA, 22 bp, synthetic construct
  misc_feature 1..22: note = chemically synthesized
  source 1..22: mol_type = other DNA
tgttgcccaggctggagtgcag

SEQ ID NO: 60526 - DNA, 22 bp, synthetic construct
  misc_feature 1..22: note = chemically synthesized
  source 1..22: mol_type = other DNA
ttgcccaggctggagtgcagtg

SEQ ID NO: 60527 - DNA, 22 bp, synthetic construct
  misc_feature 1..22: note = chemically synthesized
  source 1..22: mol_type = other DNA
cccaggctggagtgcagtggcg

SEQ ID NO: 60528 - DNA, 22 bp, synthetic construct
  misc_feature 1..22: note = chemically synthesized
  source 1..22: mol_type = other DNA
gagtgcagtggcgccatctcgc

SEQ ID NO: 60529 - DNA, 22 bp, synthetic construct
  misc_feature 1..22: note = chemically synthesized
  source 1..22: mol_type = other DNA
gcctcactgcaacctccgcttc

SEQ ID NO: 60530 - DNA, 22 bp, synthetic construct
  misc_feature 1..22: note = chemically synthesized
  source 1..22: mol_type = other DNA
actgcaacctccgcttcctggg

SEQ ID NO: 60531 - DNA, 22 bp, synthetic construct
  misc_feature 1..22: note = chemically synthesized
  source 1..22: mol_type = other DNA
caacctccgcttcctgggttca

SEQ ID NO: 60532 - DNA, 22 bp, synthetic construct
  misc_feature 1..22: note = chemically synthesized
  source 1..22: mol_type = other DNA
cgcttcctgggttcaagctatt

SEQ ID NO: 60533 - DNA, 22 bp, synthetic construct
  misc_feature 1..22: note = chemically synthesized
  source 1..22: mol_type = other DNA
cctgggttcaagctattcttct

SEQ ID NO: 60534 - DNA, 22 bp, synthetic construct
  misc_feature 1..22: note = chemically synthesized
  source 1..22: mol_type = other DNA
ctgggttcaagctattcttctg

SEQ ID NO: 60535 - DNA, 22 bp, synthetic construct
  misc_feature 1..22: note = chemically synthesized
  source 1..22: mol_type = other DNA
ggttcaagctattcttctgcct

SEQ ID NO: 60536 - DNA, 22 bp, synthetic construct
  misc_feature 1..22: note = chemically synthesized
  source 1..22: mol_type = other DNA
aagctattcttctgcctcagcc

SEQ ID NO: 60537 - DNA, 22 bp, synthetic construct
  misc_feature 1..22: note = chemically synthesized
  source 1..22: mol_type = other DNA
ttcttctgcctcagcctaccga

SEQ ID NO: 60538 - DNA, 22 bp, synthetic construct
  misc_feature 1..22: note = chemically synthesized
  source 1..22: mol_type = other DNA
ttctgcctcagcctaccgagta

SEQ ID NO: 60539 - DNA, 22 bp, synthetic construct
  misc_feature 1..22: note = chemically synthesized
  source 1..22: mol_type = other DNA
ctgcctcagcctaccgagtagc

SEQ ID NO: 60540 - DNA, 22 bp, synthetic construct
  misc_feature 1..22: note = chemically synthesized
  source 1..22: mol_type = other DNA
tgcctcagcctaccgagtagct

SEQ ID NO: 60541 - DNA, 22 bp, synthetic construct
  misc_feature 1..22: note = chemically synthesized
  source 1..22: mol_type = other DNA
cctcagcctaccgagtagctgg

SEQ ID NO: 60542 - DNA, 22 bp, synthetic construct
  misc_feature 1..22: note = chemically synthesized
  source 1..22: mol_type = other DNA
agcctaccgagtagctgggact

SEQ ID NO: 60543 - DNA, 22 bp, synthetic construct
  misc_feature 1..22: note = chemically synthesized
  source 1..22: mol_type = other DNA
ccgagtagctgggactacaggc

SEQ ID NO: 60544 - DNA, 22 bp, synthetic construct
  misc_feature 1..22: note = chemically synthesized
  source 1..22: mol_type = other DNA
ggactacaggcacgtgccacca

SEQ ID NO: 60545 - DNA, 22 bp, synthetic construct
  misc_feature 1..22: note = chemically synthesized
  source 1..22: mol_type = other DNA
caggcacgtgccaccacacctg

SEQ ID NO: 60546 - DNA, 22 bp, synthetic construct
  misc_feature 1..22: note = chemically synthesized
  source 1..22: mol_type = other DNA
gctaatttttttatttttagta

SEQ ID NO: 60547 - DNA, 22 bp, synthetic construct
  misc_feature 1..22: note = chemically synthesized
  source 1..22: mol_type = other DNA
atttttttatttttagtagaga

SEQ ID NO: 60548 - DNA, 22 bp, synthetic construct
  misc_feature 1..22: note = chemically synthesized
  source 1..22: mol_type = other DNA
ttttatttttagtagagatggg

SEQ ID NO: 60549 - DNA, 22 bp, synthetic construct
  misc_feature 1..22: note = chemically synthesized
  source 1..22: mol_type = other DNA
tttatttttagtagagatgggg

SEQ ID NO: 60550 - DNA, 22 bp, synthetic construct
  misc_feature 1..22: note = chemically synthesized
  source 1..22: mol_type = other DNA
ttatttttagtagagatggggt

SEQ ID NO: 60551 - DNA, 22 bp, synthetic construct
  misc_feature 1..22: note = chemically synthesized
  source 1..22: mol_type = other DNA
tatttttagtagagatggggtt

SEQ ID NO: 60552 - DNA, 22 bp, synthetic construct
  misc_feature 1..22: note = chemically synthesized
  source 1..22: mol_type = other DNA
atttttagtagagatggggttt

SEQ ID NO: 60553 - DNA, 22 bp, synthetic construct
  misc_feature 1..22: note = chemically synthesized
  source 1..22: mol_type = other DNA
tttttagtagagatggggtttc

SEQ ID NO: 60554 - DNA, 22 bp, synthetic construct
  misc_feature 1..22: note = chemically synthesized
  source 1..22: mol_type = other DNA
ttagtagagatggggtttcacc

SEQ ID NO: 60555 - DNA, 22 bp, synthetic construct
  misc_feature 1..22: note = chemically synthesized
  source 1..22: mol_type = other DNA
tagtagagatggggtttcacca

SEQ ID NO: 60556 - DNA, 22 bp, synthetic construct
  misc_feature 1..22: note = chemically synthesized
  source 1..22: mol_type = other DNA
agtagagatggggtttcaccat

SEQ ID NO: 60557 - DNA, 22 bp, synthetic construct
  misc_feature 1..22: note = chemically synthesized
  source 1..22: mol_type = other DNA
gtagagatggggtttcaccata

SEQ ID NO: 60558 - DNA, 22 bp, synthetic construct
  misc_feature 1..22: note = chemically synthesized
  source 1..22: mol_type = other DNA
caccatattggccaggctggtc

SEQ ID NO: 60559 - DNA, 22 bp, synthetic construct
  misc_feature 1..22: note = chemically synthesized
  source 1..22: mol_type = other DNA
accatattggccaggctggtct

SEQ ID NO: 60560 - DNA, 22 bp, synthetic construct
  misc_feature 1..22: note = chemically synthesized
  source 1..22: mol_type = other DNA
gccaggctggtcttgaactcct

SEQ ID NO: 60561 - DNA, 22 bp, synthetic construct
  misc_feature 1..22: note = chemically synthesized
  source 1..22: mol_type = other DNA
gtcttgaactcctgacctagtg

SEQ ID NO: 60562 - DNA, 22 bp, synthetic construct
  misc_feature 1..22: note = chemically synthesized
  source 1..22: mol_type = other DNA
gaactcctgacctagtgatcca

SEQ ID NO: 60563 - DNA, 22 bp, synthetic construct
  misc_feature 1..22: note = chemically synthesized
  source 1..22: mol_type = other DNA
aactcctgacctagtgatccat

SEQ ID NO: 60564 - DNA, 22 bp, synthetic construct
  misc_feature 1..22: note = chemically synthesized
  source 1..22: mol_type = other DNA
ctgacctagtgatccatccgcc

SEQ ID NO: 60565 - DNA, 22 bp, synthetic construct
  misc_feature 1..22: note = chemically synthesized
  source 1..22: mol_type = other DNA
acctagtgatccatccgcctca

SEQ ID NO: 60566 - DNA, 22 bp, synthetic construct
  misc_feature 1..22: note = chemically synthesized
  source 1..22: mol_type = other DNA
gtgatccatccgcctcagcctc

SEQ ID NO: 60567 - DNA, 22 bp, synthetic construct
  misc_feature 1..22: note = chemically synthesized
  source 1..22: mol_type = other DNA
agcctcccaaagtgctgggatt

SEQ ID NO: 60568 - DNA, 22 bp, synthetic construct
  misc_feature 1..22: note = chemically synthesized
  source 1..22: mol_type = other DNA
ccaaagtgctgggattgcaggc

SEQ ID NO: 60569 - DNA, 22 bp, synthetic construct
  misc_feature 1..22: note = chemically synthesized
  source 1..22: mol_type = other DNA
ggattgcaggcatgagccaccg

SEQ ID NO: 60570 - DNA, 22 bp, synthetic construct
  misc_feature 1..22: note = chemically synthesized
  source 1..22: mol_type = other DNA
caggcatgagccaccgcgcctg

SEQ ID NO: 60571 - DNA, 22 bp, synthetic construct
  misc_feature 1..22: note = chemically synthesized
  source 1..22: mol_type = other DNA
gccttttttttttttttttgag

SEQ ID NO: 60572 - DNA, 22 bp, synthetic construct
  misc_feature 1..22: note = chemically synthesized
  source 1..22: mol_type = other DNA
ttttttttttttttgagacgga

SEQ ID NO: 60573 - DNA, 22 bp, synthetic construct
  misc_feature 1..22: note = chemically synthesized
  source 1..22: mol_type = other DNA
tttttttttttttgagacggag

SEQ ID NO: 60574 - DNA, 22 bp, synthetic construct
  misc_feature 1..22: note = chemically synthesized
  source 1..22: mol_type = other DNA
ttttttttttttgagacggagt

SEQ ID NO: 60575 - DNA, 22 bp, synthetic construct
  misc_feature 1..22: note = chemically synthesized
  source 1..22: mol_type = other DNA
tttttttttttgagacggagtt

SEQ ID NO: 60576 - DNA, 22 bp, synthetic construct
  misc_feature 1..22: note = chemically synthesized
  source 1..22: mol_type = other DNA
ttttttttttgagacggagttt

SEQ ID NO: 60577 - DNA, 22 bp, synthetic construct
  misc_feature 1..22: note = chemically synthesized
  source 1..22: mol_type = other DNA
tttttttttgagacggagtttt

SEQ ID NO: 60578 - DNA, 22 bp, synthetic construct
  misc_feature 1..22: note = chemically synthesized
  source 1..22: mol_type = other DNA
ttttttttgagacggagttttg

SEQ ID NO: 60579 - DNA, 22 bp, synthetic construct
  misc_feature 1..22: note = chemically synthesized
  source 1..22: mol_type = other DNA
tttttttgagacggagttttgc

SEQ ID NO: 60580 - DNA, 22 bp, synthetic construct
  misc_feature 1..22: note = chemically synthesized
  source 1..22: mol_type = other DNA
ttttttgagacggagttttgct

SEQ ID NO: 60581 - DNA, 22 bp, synthetic construct
  misc_feature 1..22: note = chemically synthesized
  source 1..22: mol_type = other DNA
tttttgagacggagttttgctc

SEQ ID NO: 60582 - DNA, 22 bp, synthetic construct
  misc_feature 1..22: note = chemically synthesized
  source 1..22: mol_type = other DNA
ttttgagacggagttttgctct

SEQ ID NO: 60583 - DNA, 22 bp, synthetic construct
  misc_feature 1..22: note = chemically synthesized
  source 1..22: mol_type = other DNA
tttgagacggagttttgctctt

SEQ ID NO: 60584 - DNA, 22 bp, synthetic construct
  misc_feature 1..22: note = chemically synthesized
  source 1..22: mol_type = other DNA
ttgagacggagttttgctcttg

SEQ ID NO: 60585 - DNA, 22 bp, synthetic construct
  misc_feature 1..22: note = chemically synthesized
  source 1..22: mol_type = other DNA
tgagacggagttttgctcttgt

SEQ ID NO: 60586 - DNA, 22 bp, synthetic construct
  misc_feature 1..22: note = chemically synthesized
  source 1..22: mol_type = other DNA
gagacggagttttgctcttgtt

SEQ ID NO: 60587 - DNA, 22 bp, synthetic construct
  misc_feature 1..22: note = chemically synthesized
  source 1..22: mol_type = other DNA
agacggagttttgctcttgttg

SEQ ID NO: 60588 - DNA, 22 bp, synthetic construct
  misc_feature 1..22: note = chemically synthesized
  source 1..22: mol_type = other DNA
tgctcttgttgcccaggctaga

SEQ ID NO: 60589 - DNA, 22 bp, synthetic construct
  misc_feature 1..22: note = chemically synthesized
  source 1..22: mol_type = other DNA
gctcttgttgcccaggctagag

SEQ ID NO: 60590 - DNA, 22 bp, synthetic construct
  misc_feature 1..22: note = chemically synthesized
  source 1..22: mol_type = other DNA
ctcttgttgcccaggctagagt

SEQ ID NO: 60591 - DNA, 22 bp, synthetic construct
  misc_feature 1..22: note = chemically synthesized
  source 1..22: mol_type = other DNA
ttgttgcccaggctagagtgca

SEQ ID NO: 60592 - DNA, 22 bp, synthetic construct
  misc_feature 1..22: note = chemically synthesized
  source 1..22: mol_type = other DNA
gttgcccaggctagagtgcagt

SEQ ID NO: 60593 - DNA, 22 bp, synthetic construct
  misc_feature 1..22: note = chemically synthesized
  source 1..22: mol_type = other DNA
ttgcccaggctagagtgcagtg

SEQ ID NO: 60594 - DNA, 22 bp, synthetic construct
  misc_feature 1..22: note = chemically synthesized
  source 1..22: mol_type = other DNA
cccaggctagagtgcagtggcg

SEQ ID NO: 60595 - DNA, 22 bp, synthetic construct
  misc_feature 1..22: note = chemically synthesized
  source 1..22: mol_type = other DNA
gagtgcagtggcgcagtctcgg

SEQ ID NO: 60596 - DNA, 22 bp, synthetic construct
  misc_feature 1..22: note = chemically synthesized
  source 1..22: mol_type = other DNA
ggctcactgtaacctccacctc

SEQ ID NO: 60597 - DNA, 22 bp, synthetic construct
  misc_feature 1..22: note = chemically synthesized
  source 1..22: mol_type = other DNA
actgtaacctccacctcctgag

SEQ ID NO: 60598 - DNA, 22 bp, synthetic construct
  misc_feature 1..22: note = chemically synthesized
  source 1..22: mol_type = other DNA
taacctccacctcctgagttca

SEQ ID NO: 60599 - DNA, 22 bp, synthetic construct
  misc_feature 1..22: note = chemically synthesized
  source 1..22: mol_type = other DNA
cacctcctgagttcaagcaatt

SEQ ID NO: 60600 - DNA, 22 bp, synthetic construct
  misc_feature 1..22: note = chemically synthesized
  source 1..22: mol_type = other DNA
ctgagttcaagcaattctcctg

SEQ ID NO: 60601 - DNA, 22 bp, synthetic construct
  misc_feature 1..22: note = chemically synthesized
  source 1..22: mol_type = other DNA
agttcaagcaattctcctgcct

SEQ ID NO: 60602 - DNA, 22 bp, synthetic construct
  misc_feature 1..22: note = chemically synthesized
  source 1..22: mol_type = other DNA
aagcaattctcctgcctcagcc

SEQ ID NO: 60603 - DNA, 22 bp, synthetic construct
  misc_feature 1..22: note = chemically synthesized
  source 1..22: mol_type = other DNA
tcctgcctcagcctctcaaata

SEQ ID NO: 60604 - DNA, 22 bp, synthetic construct
  misc_feature 1..22: note = chemically synthesized
  source 1..22: mol_type = other DNA
ctgcctcagcctctcaaatagc

SEQ ID NO: 60605 - DNA, 22 bp, synthetic construct
  misc_feature 1..22: note = chemically synthesized
  source 1..22: mol_type = other DNA
cctcagcctctcaaatagctgg

SEQ ID NO: 60606 - DNA, 22 bp, synthetic construct
  misc_feature 1..22: note = chemically synthesized
  source 1..22: mol_type = other DNA
agcctctcaaatagctgggatt

SEQ ID NO: 60607 - DNA, 22 bp, synthetic construct
  misc_feature 1..22: note = chemically synthesized
  source 1..22: mol_type = other DNA
tcaaatagctgggattacaggc

SEQ ID NO: 60608 - DNA, 22 bp, synthetic construct
  misc_feature 1..22: note = chemically synthesized
  source 1..22: mol_type = other DNA
aaatagctgggattacaggcgt

SEQ ID NO: 60609 - DNA, 22 bp, synthetic construct
  misc_feature 1..22: note = chemically synthesized
  source 1..22: mol_type = other DNA
ggattacaggcgtgagccaccc

SEQ ID NO: 60610 - DNA, 22 bp, synthetic construct
  misc_feature 1..22: note = chemically synthesized
  source 1..22: mol_type = other DNA
caggcgtgagccaccccacctg

SEQ ID NO: 60611 - DNA, 22 bp, synthetic construct
  misc_feature 1..22: note = chemically synthesized
  source 1..22: mol_type = other DNA
gctaattttgtaattttttttt

SEQ ID NO: 60612 - DNA, 22 bp, synthetic construct
  misc_feature 1..22: note = chemically synthesized
  source 1..22: mol_type = other DNA
attttgtaattttttttttagt

SEQ ID NO: 60613 - DNA, 22 bp, synthetic construct
  misc_feature 1..22: note = chemically synthesized
  source 1..22: mol_type = other DNA
tgtaattttttttttagtagag

SEQ ID NO: 60614 - DNA, 22 bp, synthetic construct
  misc_feature 1..22: note = chemically synthesized
  source 1..22: mol_type = other DNA
gtaattttttttttagtagaga

SEQ ID NO: 60615 - DNA, 22 bp, synthetic construct
  misc_feature 1..22: note = chemically synthesized
  source 1..22: mol_type = other DNA
taattttttttttagtagagat

SEQ ID NO: 60616 - DNA, 22 bp, synthetic construct
  misc_feature 1..22: note = chemically synthesized
  source 1..22: mol_type = other DNA
tttttttagtagagatggggtt

SEQ ID NO: 60617 - DNA, 22 bp, synthetic construct
  misc_feature 1..22: note = chemically synthesized
  source 1..22: mol_type = other DNA
ttttttagtagagatggggttt

SEQ ID NO: 60618 - DNA, 22 bp, synthetic construct
  misc_feature 1..22: note = chemically synthesized
  source 1..22: mol_type = other DNA
tttttagtagagatggggtttc

SEQ ID NO: 60619 - DNA, 22 bp, synthetic construct
  misc_feature 1..22: note = chemically synthesized
  source 1..22: mol_type = other DNA
ttttagtagagatggggtttca

SEQ ID NO: 60620 - DNA, 22 bp, synthetic construct
  misc_feature 1..22: note = chemically synthesized
  source 1..22: mol_type = other DNA
tttagtagagatggggtttcac

SEQ ID NO: 60621 - DNA, 22 bp, synthetic construct
  misc_feature 1..22: note = chemically synthesized
  source 1..22: mol_type = other DNA
ttagtagagatggggtttcacc

SEQ ID NO: 60622 - DNA, 22 bp, synthetic construct
  misc_feature 1..22: note = chemically synthesized
  source 1..22: mol_type = other DNA
tagtagagatggggtttcacct

SEQ ID NO: 60623 - DNA, 22 bp, synthetic construct
  misc_feature 1..22: note = chemically synthesized
  source 1..22: mol_type = other DNA
agtagagatggggtttcacctg

SEQ ID NO: 60624 - DNA, 22 bp, synthetic construct
  misc_feature 1..22: note = chemically synthesized
  source 1..22: mol_type = other DNA
gtagagatggggtttcacctgt

SEQ ID NO: 60625 - DNA, 22 bp, synthetic construct
  misc_feature 1..22: note = chemically synthesized
  source 1..22: mol_type = other DNA
cacctgttgatcaggctggtct

SEQ ID NO: 60626 - DNA, 22 bp, synthetic construct
  misc_feature 1..22: note = chemically synthesized
  source 1..22: mol_type = other DNA
acctgttgatcaggctggtctc

SEQ ID NO: 60627 - DNA, 22 bp, synthetic construct
  misc_feature 1..22: note = chemically synthesized
  source 1..22: mol_type = other DNA
ttgatcaggctggtctcaaact

SEQ ID NO: 60628 - DNA, 22 bp, synthetic construct
  misc_feature 1..22: note = chemically synthesized
  source 1..22: mol_type = other DNA
atcaggctggtctcaaactcct

SEQ ID NO: 60629 - DNA, 22 bp, synthetic construct
  misc_feature 1..22: note = chemically synthesized
  source 1..22: mol_type = other DNA
gtctcaaactcctgacctcaag

SEQ ID NO: 60630 - DNA, 22 bp, synthetic construct
  misc_feature 1..22: note = chemically synthesized
  source 1..22: mol_type = other DNA
aaactcctgacctcaagtgatc

SEQ ID NO: 60631 - DNA, 22 bp, synthetic construct
  misc_feature 1..22: note = chemically synthesized
  source 1..22: mol_type = other DNA
ctgacctcaagtgatccaccca

SEQ ID NO: 60632 - DNA, 22 bp, synthetic construct
  misc_feature 1..22: note = chemically synthesized
  source 1..22: mol_type = other DNA
acctcaagtgatccacccacct

SEQ ID NO: 60633 - DNA, 22 bp, synthetic construct
  misc_feature 1..22: note = chemically synthesized
  source 1..22: mol_type = other DNA
aagtgatccacccacctcggcc

SEQ ID NO: 60634 - DNA, 22 bp, synthetic construct
  misc_feature 1..22: note = chemically synthesized
  source 1..22: mol_type = other DNA
ggcctcccaaagtgctgggatt

SEQ ID NO: 60635 - DNA, 22 bp, synthetic construct
  misc_feature 1..22: note = chemically synthesized
  source 1..22: mol_type = other DNA
ccaaagtgctgggattacaagc

SEQ ID NO: 60636 - DNA, 22 bp, synthetic construct
  misc_feature 1..22: note = chemically synthesized
  source 1..22: mol_type = other DNA
ggattacaagcataagccaccg

SEQ ID NO: 60637 - DNA, 22 bp, synthetic construct
  misc_feature 1..22: note = chemically synthesized
  source 1..22: mol_type = other DNA
caagcataagccaccgtgcctg

SEQ ID NO: 60638 - DNA, 22 bp, synthetic construct
  misc_feature 1..22: note = chemically synthesized
  source 1..22: mol_type = other DNA
gtcaattttgatcttttttaaa

SEQ ID NO: 60639 - DNA, 22 bp, synthetic construct
  misc_feature 1..22: note = chemically synthesized
  source 1..22: mol_type = other DNA
tgatcttttttaaagagacagg

SEQ ID NO: 60640 - DNA, 22 bp, synthetic construct
  misc_feature 1..22: note = chemically synthesized
  source 1..22: mol_type = other DNA
gatcttttttaaagagacaggg

SEQ ID NO: 60641 - DNA, 22 bp, synthetic construct
  misc_feature 1..22: note = chemically synthesized
  source 1..22: mol_type = other DNA
atcttttttaaagagacagggg

SEQ ID NO: 60642 - DNA, 22 bp, synthetic construct
  misc_feature 1..22: note = chemically synthesized
  source 1..22: mol_type = other DNA
ttttaaagagacaggggtcttg

SEQ ID NO: 60643 - DNA, 22 bp, synthetic construct
  misc_feature 1..22: note = chemically synthesized
  source 1..22: mol_type = other DNA
tttaaagagacaggggtcttgc

SEQ ID NO: 60644 - DNA, 22 bp, synthetic construct
  misc_feature 1..22: note = chemically synthesized
  source 1..22: mol_type = other DNA
ttaaagagacaggggtcttgct

SEQ ID NO: 60645 - DNA, 22 bp, synthetic construct
  misc_feature 1..22: note = chemically synthesized
  source 1..22: mol_type = other DNA
taaagagacaggggtcttgcta

SEQ ID NO: 60646 - DNA, 22 bp, synthetic construct
  misc_feature 1..22: note = chemically synthesized
  source 1..22: mol_type = other DNA
aaagagacaggggtcttgctat

SEQ ID NO: 60647 - DNA, 22 bp, synthetic construct
  misc_feature 1..22: note = chemically synthesized
  source 1..22: mol_type = other DNA
aagagacaggggtcttgctatg

SEQ ID NO: 60648 - DNA, 22 bp, synthetic construct
  misc_feature 1..22: note = chemically synthesized
  source 1..22: mol_type = other DNA
gctatgttgcccagactagtct

SEQ ID NO: 60649 - DNA, 22 bp, synthetic construct
  misc_feature 1..22: note = chemically synthesized
  source 1..22: mol_type = other DNA
ctatgttgcccagactagtctt

SEQ ID NO: 60650 - DNA, 22 bp, synthetic construct
  misc_feature 1..22: note = chemically synthesized
  source 1..22: mol_type = other DNA
tgttgcccagactagtcttgaa

SEQ ID NO: 60651 - DNA, 22 bp, synthetic construct
  misc_feature 1..22: note = chemically synthesized
  source 1..22: mol_type = other DNA
cccagactagtcttgaactcct

SEQ ID NO: 60652 - DNA, 22 bp, synthetic construct
  misc_feature 1..22: note = chemically synthesized
  source 1..22: mol_type = other DNA
gtcttgaactcctggcctcaag

SEQ ID NO: 60653 - DNA, 22 bp, synthetic construct
  misc_feature 1..22: note = chemically synthesized
  source 1..22: mol_type = other DNA
gaactcctggcctcaagtgatc

SEQ ID NO: 60654 - DNA, 22 bp, synthetic construct
  misc_feature 1..22: note = chemically synthesized
  source 1..22: mol_type = other DNA
aactcctggcctcaagtgatcc

SEQ ID NO: 60655 - DNA, 22 bp, synthetic construct
  misc_feature 1..22: note = chemically synthesized
  source 1..22: mol_type = other DNA
ctggcctcaagtgatcctctca

SEQ ID NO: 60656 - DNA, 22 bp, synthetic construct
  misc_feature 1..22: note = chemically synthesized
  source 1..22: mol_type = other DNA
gcctcaagtgatcctctcacct

SEQ ID NO: 60657 - DNA, 22 bp, synthetic construct
  misc_feature 1..22: note = chemically synthesized
  source 1..22: mol_type = other DNA
aagtgatcctctcacctcggcc

SEQ ID NO: 60658 - DNA, 22 bp, synthetic construct
  misc_feature 1..22: note = chemically synthesized
  source 1..22: mol_type = other DNA
tcacctcggcctcccaaagtat

SEQ ID NO: 60659 - DNA, 22 bp, synthetic construct
  misc_feature 1..22: note = chemically synthesized
  source 1..22: mol_type = other DNA
acctcggcctcccaaagtattg

SEQ ID NO: 60660 - DNA, 22 bp, synthetic construct
  misc_feature 1..22: note = chemically synthesized
  source 1..22: mol_type = other DNA
ggcctcccaaagtattgggatt

SEQ ID NO: 60661 - DNA, 22 bp, synthetic construct
  misc_feature 1..22: note = chemically synthesized
  source 1..22: mol_type = other DNA
ccaaagtattgggattacaggt

SEQ ID NO: 60662 - DNA, 22 bp, synthetic construct
  misc_feature 1..22: note = chemically synthesized
  source 1..22: mol_type = other DNA
ggattacaggtctgagccgctg

SEQ ID NO: 60663 - DNA, 22 bp, synthetic construct
  misc_feature 1..22: note = chemically synthesized
  source 1..22: mol_type = other DNA
caggtctgagccgctgcaccca

SEQ ID NO: 60664 - DNA, 22 bp, synthetic construct
  misc_feature 1..22: note = chemically synthesized
  source 1..22: mol_type = other DNA
agccgctgcacccagcccccaa

SEQ ID NO: 60665 - DNA, 22 bp, synthetic construct
  misc_feature 1..22: note = chemically synthesized
  source 1..22: mol_type = other DNA
cacccagcccccaacaggcatc

SEQ ID NO: 60666 - DNA, 22 bp, synthetic construct
  misc_feature 1..22: note = chemically synthesized
  source 1..22: mol_type = other DNA
tggacttttgagtactggcttt

SEQ ID NO: 60667 - DNA, 22 bp, synthetic construct
  misc_feature 1..22: note = chemically synthesized
  source 1..22: mol_type = other DNA
ggacttttgagtactggcttta

SEQ ID NO: 60668 - DNA, 22 bp, synthetic construct
  misc_feature 1..22: note = chemically synthesized
  source 1..22: mol_type = other DNA
gacttttgagtactggctttaa

SEQ ID NO: 60669 - DNA, 22 bp, synthetic construct
  misc_feature 1..22: note = chemically synthesized
  source 1..22: mol_type = other DNA
ttgagtactggctttaatttac

SEQ ID NO: 60670 - DNA, 22 bp, synthetic construct
  misc_feature 1..22: note = chemically synthesized
  source 1..22: mol_type = other DNA
tgagtactggctttaatttaca

SEQ ID NO: 60671 - DNA, 22 bp, synthetic construct
  misc_feature 1..22: note = chemically synthesized
  source 1..22: mol_type = other DNA
gagtactggctttaatttacaa

SEQ ID NO: 60672 - DNA, 22 bp, synthetic construct
  misc_feature 1..22: note = chemically synthesized
  source 1..22: mol_type = other DNA
agtactggctttaatttacaaa

SEQ ID NO: 60673 - DNA, 22 bp, synthetic construct
  misc_feature 1..22: note = chemically synthesized
  source 1..22: mol_type = other DNA
gctttaatttacaaaaattcca

SEQ ID NO: 60674 - DNA, 22 bp, synthetic construct
  misc_feature 1..22: note = chemically synthesized
  source 1..22: mol_type = other DNA
taatttacaaaaattccactga

SEQ ID NO: 60675 - DNA, 22 bp, synthetic construct
  misc_feature 1..22: note = chemically synthesized
  source 1..22: mol_type = other DNA
aatttacaaaaattccactgag

SEQ ID NO: 60676 - DNA, 22 bp, synthetic construct
  misc_feature 1..22: note = chemically synthesized
  source 1..22: mol_type = other DNA
atttacaaaaattccactgaga

SEQ ID NO: 60677 - DNA, 22 bp, synthetic construct
  misc_feature 1..22: note = chemically synthesized
  source 1..22: mol_type = other DNA
acaaaaattccactgagagcac

SEQ ID NO: 60678 - DNA, 22 bp, synthetic construct
  misc_feature 1..22: note = chemically synthesized
  source 1..22: mol_type = other DNA
caaaaattccactgagagcacc

SEQ ID NO: 60679 - DNA, 22 bp, synthetic construct
  misc_feature 1..22: note = chemically synthesized
  source 1..22: mol_type = other DNA
cactgagagcacctaagtttgc

SEQ ID NO: 60680 - DNA, 22 bp, synthetic construct
  misc_feature 1..22: note = chemically synthesized
  source 1..22: mol_type = other DNA
agagcacctaagtttgccaggc

SEQ ID NO: 60681 - DNA, 22 bp, synthetic construct
  misc_feature 1..22: note = chemically synthesized
  source 1..22: mol_type = other DNA
agtttgccaggctccaacattt

SEQ ID NO: 60682 - DNA, 22 bp, synthetic construct
  misc_feature 1..22: note = chemically synthesized
  source 1..22: mol_type = other DNA
gccaggctccaacatttctgca

SEQ ID NO: 60683 - DNA, 22 bp, synthetic construct
  misc_feature 1..22: note = chemically synthesized
  source 1..22: mol_type = other DNA
ccaggctccaacatttctgcag

SEQ ID NO: 60684 - DNA, 22 bp, synthetic construct
  misc_feature 1..22: note = chemically synthesized
  source 1..22: mol_type = other DNA
caacatttctgcaggggctgtt

SEQ ID NO: 60685 - DNA, 22 bp, synthetic construct
  misc_feature 1..22: note = chemically synthesized
  source 1..22: mol_type = other DNA
ctgcaggggctgttttctttgc

SEQ ID NO: 60686 - DNA, 22 bp, synthetic construct
  misc_feature 1..22: note = chemically synthesized
  source 1..22: mol_type = other DNA
tgcaggggctgttttctttgct

SEQ ID NO: 60687 - DNA, 22 bp, synthetic construct
  misc_feature 1..22: note = chemically synthesized
  source 1..22: mol_type = other DNA
caggggctgttttctttgctga

SEQ ID NO: 60688 - DNA, 22 bp, synthetic construct
  misc_feature 1..22: note = chemically synthesized
  source 1..22: mol_type = other DNA
ttttctttgctgaaggatctgc

SEQ ID NO: 60689 - DNA, 22 bp, synthetic construct
  misc_feature 1..22: note = chemically synthesized
  source 1..22: mol_type = other DNA
tctttgctgaaggatctgcacc

SEQ ID NO: 60690 - DNA, 22 bp, synthetic construct
  misc_feature 1..22: note = chemically synthesized
  source 1..22: mol_type = other DNA
ctttgctgaaggatctgcacct

SEQ ID NO: 60691 - DNA, 22 bp, synthetic construct
  misc_feature 1..22: note = chemically synthesized
  source 1..22: mol_type = other DNA
tttgctgaaggatctgcacctg

SEQ ID NO: 60692 - DNA, 22 bp, synthetic construct
  misc_feature 1..22: note = chemically synthesized
  source 1..22: mol_type = other DNA
tgctgaaggatctgcacctgtg

SEQ ID NO: 60693 - DNA, 22 bp, synthetic construct
  misc_feature 1..22: note = chemically synthesized
  source 1..22: mol_type = other DNA
gctgaaggatctgcacctgtgt

SEQ ID NO: 60694 - DNA, 22 bp, synthetic construct
  misc_feature 1..22: note = chemically synthesized
  source 1..22: mol_type = other DNA
ctgaaggatctgcacctgtgtt

SEQ ID NO: 60695 - DNA, 22 bp, synthetic construct
  misc_feature 1..22: note = chemically synthesized
  source 1..22: mol_type = other DNA
aaggatctgcacctgtgttctg

SEQ ID NO: 60696 - DNA, 22 bp, synthetic construct
  misc_feature 1..22: note = chemically synthesized
  source 1..22: mol_type = other DNA
cacctgtgttctgttatggttg

SEQ ID NO: 60697 - DNA, 22 bp, synthetic construct
  misc_feature 1..22: note = chemically synthesized
  source 1..22: mol_type = other DNA
tgttctgttatggttgcctctt

SEQ ID NO: 60698 - DNA, 22 bp, synthetic construct
  misc_feature 1..22: note = chemically synthesized
  source 1..22: mol_type = other DNA
tgttatggttgcctcttctgtt

SEQ ID NO: 60699 - DNA, 22 bp, synthetic construct
  misc_feature 1..22: note = chemically synthesized
  source 1..22: mol_type = other DNA
ttatggttgcctcttctgttgc

SEQ ID NO: 60700 - DNA, 22 bp, synthetic construct
  misc_feature 1..22: note = chemically synthesized
  source 1..22: mol_type = other DNA
tggttgcctcttctgttgcagg

SEQ ID NO: 60701 - DNA, 22 bp, synthetic construct
  misc_feature 1..22: note = chemically synthesized
  source 1..22: mol_type = other DNA
cctcttctgttgcaggtgcttg

SEQ ID NO: 60702 - DNA, 22 bp, synthetic construct
  misc_feature 1..22: note = chemically synthesized
  source 1..22: mol_type = other DNA
ttctgttgcaggtgcttgaatg

SEQ ID NO: 60703 - DNA, 22 bp, synthetic construct
  misc_feature 1..22: note = chemically synthesized
  source 1..22: mol_type = other DNA
ctgttgcaggtgcttgaatgtc

SEQ ID NO: 60704 - DNA, 22 bp, synthetic construct
  misc_feature 1..22: note = chemically synthesized
  source 1..22: mol_type = other DNA
tgttgcaggtgcttgaatgtca

SEQ ID NO: 60705 - DNA, 22 bp, synthetic construct
  misc_feature 1..22: note = chemically synthesized
  source 1..22: mol_type = other DNA
ttgcaggtgcttgaatgtcatt

SEQ ID NO: 60706 - DNA, 22 bp, synthetic construct
  misc_feature 1..22: note = chemically synthesized
  source 1..22: mol_type = other DNA
caggtgcttgaatgtcattttg

SEQ ID NO: 60707 - DNA, 22 bp, synthetic construct
  misc_feature 1..22: note = chemically synthesized
  source 1..22: mol_type = other DNA
gaatgtcattttgtggttggga

SEQ ID NO: 60708 - DNA, 22 bp, synthetic construct
  misc_feature 1..22: note = chemically synthesized
  source 1..22: mol_type = other DNA
aatgtcattttgtggttgggat

SEQ ID NO: 60709 - DNA, 22 bp, synthetic construct
  misc_feature 1..22: note = chemically synthesized
  source 1..22: mol_type = other DNA
tgtggttgggattctgggctgt

SEQ ID NO: 60710 - DNA, 22 bp, synthetic construct
  misc_feature 1..22: note = chemically synthesized
  source 1..22: mol_type = other DNA
gtggttgggattctgggctgtg

SEQ ID NO: 60711 - DNA, 22 bp, synthetic construct
  misc_feature 1..22: note = chemically synthesized
  source 1..22: mol_type = other DNA
tggttgggattctgggctgtgc

SEQ ID NO: 60712 - DNA, 22 bp, synthetic construct
  misc_feature 1..22: note = chemically synthesized
  source 1..22: mol_type = other DNA
ggattctgggctgtgcagctga

SEQ ID NO: 60713 - DNA, 22 bp, synthetic construct
  misc_feature 1..22: note = chemically synthesized
  source 1..22: mol_type = other DNA
tgggctgtgcagctgaatgtct

SEQ ID NO: 60714 - DNA, 22 bp, synthetic construct
  misc_feature 1..22: note = chemically synthesized
  source 1..22: mol_type = other DNA
ggctgtgcagctgaatgtctgt

SEQ ID NO: 60715 - DNA, 22 bp, synthetic construct
  misc_feature 1..22: note = chemically synthesized
  source 1..22: mol_type = other DNA
tgcagctgaatgtctgtctgtc

SEQ ID NO: 60716 - DNA, 22 bp, synthetic construct
  misc_feature 1..22: note = chemically synthesized
  source 1..22: mol_type = other DNA
aatgtctgtctgtcacgaatct

SEQ ID NO: 60717 - DNA, 22 bp, synthetic construct
  misc_feature 1..22: note = chemically synthesized
  source 1..22: mol_type = other DNA
tctgtcacgaatctaccttgct

SEQ ID NO: 60718 - DNA, 22 bp, synthetic construct
  misc_feature 1..22: note = chemically synthesized
  source 1..22: mol_type = other DNA
tcacgaatctaccttgctgctc

SEQ ID NO: 60719 - DNA, 22 bp, synthetic construct
  misc_feature 1..22: note = chemically synthesized
  source 1..22: mol_type = other DNA
ccttgctgctcattttcctcat

SEQ ID NO: 60720 - DNA, 22 bp, synthetic construct
  misc_feature 1..22: note = chemically synthesized
  source 1..22: mol_type = other DNA
gctgctcattttcctcatcaag

SEQ ID NO: 60721 - DNA, 22 bp, synthetic construct
  misc_feature 1..22: note = chemically synthesized
  source 1..22: mol_type = other DNA
ctgctcattttcctcatcaagt

SEQ ID NO: 60722 - DNA, 22 bp, synthetic construct
  misc_feature 1..22: note = chemically synthesized
  source 1..22: mol_type = other DNA
ctcattttcctcatcaagttgt

SEQ ID NO: 60723 - DNA, 22 bp, synthetic construct
  misc_feature 1..22: note = chemically synthesized
  source 1..22: mol_type = other DNA
attttcctcatcaagttgttgc

SEQ ID NO: 60724 - DNA, 22 bp, synthetic construct
  misc_feature 1..22: note = chemically synthesized
  source 1..22: mol_type = other DNA
tcctcatcaagttgttgctgga

SEQ ID NO: 60725 - DNA, 22 bp, synthetic construct
  misc_feature 1..22: note = chemically synthesized
  source 1..22: mol_type = other DNA
cctcatcaagttgttgctggag

SEQ ID NO: 60726 - DNA, 22 bp, synthetic construct
  misc_feature 1..22: note = chemically synthesized
  source 1..22: mol_type = other DNA
ctcatcaagttgttgctggagt

SEQ ID NO: 60727 - DNA, 22 bp, synthetic construct
  misc_feature 1..22: note = chemically synthesized
  source 1..22: mol_type = other DNA
atcaagttgttgctggagtcct

SEQ ID NO: 60728 - DNA, 22 bp, synthetic construct
  misc_feature 1..22: note = chemically synthesized
  source 1..22: mol_type = other DNA
ttgctggagtcctgtcaggtat

SEQ ID NO: 60729 - DNA, 22 bp, synthetic construct
  misc_feature 1..22: note = chemically synthesized
  source 1..22: mol_type = other DNA
ctggagtcctgtcaggtatggg

SEQ ID NO: 60730 - DNA, 22 bp, synthetic construct
  misc_feature 1..22: note = chemically synthesized
  source 1..22: mol_type = other DNA
gagtcctgtcaggtatgggctg

SEQ ID NO: 60731 - DNA, 22 bp, synthetic construct
  misc_feature 1..22: note = chemically synthesized
  source 1..22: mol_type = other DNA
tcaggtatgggctgatctgact

SEQ ID NO: 60732 - DNA, 22 bp, synthetic construct
  misc_feature 1..22: note = chemically synthesized
  source 1..22: mol_type = other DNA
atctgactcccttccttctccc

SEQ ID NO: 60733 - DNA, 22 bp, synthetic construct
  misc_feature 1..22: note = chemically synthesized
  source 1..22: mol_type = other DNA
actcccttccttctcccccaaa

SEQ ID NO: 60734 - DNA, 22 bp, synthetic construct
  misc_feature 1..22: note = chemically synthesized
  source 1..22: mol_type = other DNA
ccttccttctcccccaaacccc

SEQ ID NO: 60735 - DNA, 22 bp, synthetic construct
  misc_feature 1..22: note = chemically synthesized
  source 1..22: mol_type = other DNA
ccttctcccccaaaccccattc

SEQ ID NO: 60736 - DNA, 22 bp, synthetic construct
  misc_feature 1..22: note = chemically synthesized
  source 1..22: mol_type = other DNA
cttctcccccaaaccccattcc

SEQ ID NO: 60737 - DNA, 22 bp, synthetic construct
  misc_feature 1..22: note = chemically synthesized
  source 1..22: mol_type = other DNA
ctcccccaaaccccattccgtt

SEQ ID NO: 60738 - DNA, 22 bp, synthetic construct
  misc_feature 1..22: note = chemically synthesized
  source 1..22: mol_type = other DNA
tcccccaaaccccattccgttt

SEQ ID NO: 60739 - DNA, 22 bp, synthetic construct
  misc_feature 1..22: note = chemically synthesized
  source 1..22: mol_type = other DNA
ccccaaaccccattccgtttct

SEQ ID NO: 60740 - DNA, 22 bp, synthetic construct
  misc_feature 1..22: note = chemically synthesized
  source 1..22: mol_type = other DNA
cgtttctctccctaatcaggac

SEQ ID NO: 60741 - DNA, 22 bp, synthetic construct
  misc_feature 1..22: note = chemically synthesized
  source 1..22: mol_type = other DNA
ctctccctaatcaggacaaaat

SEQ ID NO: 60742 - DNA, 22 bp, synthetic construct
  misc_feature 1..22: note = chemically synthesized
  source 1..22: mol_type = other DNA
tctccctaatcaggacaaaatc

SEQ ID NO: 60743 - DNA, 22 bp, synthetic construct
  misc_feature 1..22: note = chemically synthesized
  source 1..22: mol_type = other DNA
tccctaatcaggacaaaatccc

SEQ ID NO: 60744 - DNA, 22 bp, synthetic construct
  misc_feature 1..22: note = chemically synthesized
  source 1..22: mol_type = other DNA
cctaatcaggacaaaatcccag

SEQ ID NO: 60745 - DNA, 22 bp, synthetic construct
  misc_feature 1..22: note = chemically synthesized
  source 1..22: mol_type = other DNA
atcaggacaaaatcccagcatt

SEQ ID NO: 60746 - DNA, 22 bp, synthetic construct
  misc_feature 1..22: note = chemically synthesized
  source 1..22: mol_type = other DNA
cagccacatcctgtgtgtaatc

SEQ ID NO: 60747 - DNA, 22 bp, synthetic construct
  misc_feature 1..22: note = chemically synthesized
  source 1..22: mol_type = other DNA
tgtgtaatcagtactgttagca

SEQ ID NO: 60748 - DNA, 22 bp, synthetic construct
  misc_feature 1..22: note = chemically synthesized
  source 1..22: mol_type = other DNA
ttagcatttctgtgggttgaaa

SEQ ID NO: 60749 - DNA, 22 bp, synthetic construct
  misc_feature 1..22: note = chemically synthesized
  source 1..22: mol_type = other DNA
gcatttctgtgggttgaaagtc

SEQ ID NO: 60750 - DNA, 22 bp, synthetic construct
  misc_feature 1..22: note = chemically synthesized
  source 1..22: mol_type = other DNA
ctgtgggttgaaagtcaagaat

SEQ ID NO: 60751 - DNA, 22 bp, synthetic construct
  misc_feature 1..22: note = chemically synthesized
  source 1..22: mol_type = other DNA
tgtgggttgaaagtcaagaatg

SEQ ID NO: 60752 - DNA, 22 bp, synthetic construct
  misc_feature 1..22: note = chemically synthesized
  source 1..22: mol_type = other DNA
tgggttgaaagtcaagaatgag

SEQ ID NO: 60753 - DNA, 22 bp, synthetic construct
  misc_feature 1..22: note = chemically synthesized
  source 1..22: mol_type = other DNA
aaagtcaagaatgagcaacttg

SEQ ID NO: 60754 - DNA, 22 bp, synthetic construct
  misc_feature 1..22: note = chemically synthesized
  source 1..22: mol_type = other DNA
gaaatgattaatttctataaga

SEQ ID NO: 60755 - DNA, 22 bp, synthetic construct
  misc_feature 1..22: note = chemically synthesized
  source 1..22: mol_type = other DNA
aaatgattaatttctataagag

SEQ ID NO: 60756 - DNA, 22 bp, synthetic construct
  misc_feature 1..22: note = chemically synthesized
  source 1..22: mol_type = other DNA
atttctataagagtgcccagat

SEQ ID NO: 60757 - DNA, 22 bp, synthetic construct
  misc_feature 1..22: note = chemically synthesized
  source 1..22: mol_type = other DNA
ctataagagtgcccagatctat

SEQ ID NO: 60758 - DNA, 22 bp, synthetic construct
  misc_feature 1..22: note = chemically synthesized
  source 1..22: mol_type = other DNA
tataagagtgcccagatctata

SEQ ID NO: 60759 - DNA, 22 bp, synthetic construct
  misc_feature 1..22: note = chemically synthesized
  source 1..22: mol_type = other DNA
taagagtgcccagatctataga

SEQ ID NO: 60760 - DNA, 22 bp, synthetic construct
  misc_feature 1..22: note = chemically synthesized
  source 1..22: mol_type = other DNA
tagaatgaattgtgtagaagtt

SEQ ID NO: 60761 - DNA, 22 bp, synthetic construct
  misc_feature 1..22: note = chemically synthesized
  source 1..22: mol_type = other DNA
tgtagaagttaccatacatcaa

SEQ ID NO: 60762 - DNA, 22 bp, synthetic construct
  misc_feature 1..22: note = chemically synthesized
  source 1..22: mol_type = other DNA
ccatacatcaaattaacgcacc

SEQ ID NO: 60763 - DNA, 22 bp, synthetic construct
  misc_feature 1..22: note = chemically synthesized
  source 1..22: mol_type = other DNA
acgcaccaaattgaattagctt

SEQ ID NO: 60764 - DNA, 22 bp, synthetic construct
  misc_feature 1..22: note = chemically synthesized
  source 1..22: mol_type = other DNA
aattagcttgaaatctcagagc

SEQ ID NO: 60765 - DNA, 22 bp, synthetic construct
  misc_feature 1..22: note = chemically synthesized
  source 1..22: mol_type = other DNA
gcttgaaatctcagagcttttt

SEQ ID NO: 60766 - DNA, 22 bp, synthetic construct
  misc_feature 1..22: note = chemically synthesized
  source 1..22: mol_type = other DNA
gaaatctcagagctttttacaa

SEQ ID NO: 60767 - DNA, 22 bp, synthetic construct
  misc_feature 1..22: note = chemically synthesized
  source 1..22: mol_type = other DNA
aaatctcagagctttttacaat

SEQ ID NO: 60768 - DNA, 22 bp, synthetic construct
  misc_feature 1..22: note = chemically synthesized
  source 1..22: mol_type = other DNA
agagctttttacaatctttatt

SEQ ID NO: 60769 - DNA, 22 bp, synthetic construct
  misc_feature 1..22: note = chemically synthesized
  source 1..22: mol_type = other DNA
tttacaatctttatttcttact

SEQ ID NO: 60770 - DNA, 22 bp, synthetic construct
  misc_feature 1..22: note = chemically synthesized
  source 1..22: mol_type = other DNA
ttacaatctttatttcttactg

SEQ ID NO: 60771 - DNA, 22 bp, synthetic construct
  misc_feature 1..22: note = chemically synthesized
  source 1..22: mol_type = other DNA
tacaatctttatttcttactgg

SEQ ID NO: 60772 - DNA, 22 bp, synthetic construct
  misc_feature 1..22: note = chemically synthesized
  source 1..22: mol_type = other DNA
acaatctttatttcttactggt

SEQ ID NO: 60773 - DNA, 22 bp, synthetic construct
  misc_feature 1..22: note = chemically synthesized
  source 1..22: mol_type = other DNA
caatctttatttcttactggtc

SEQ ID NO: 60774 - DNA, 22 bp, synthetic construct
  misc_feature 1..22: note = chemically synthesized
  source 1..22: mol_type = other DNA
tatttcttactggtcttcaaca

SEQ ID NO: 60775 - DNA, 22 bp, synthetic construct
  misc_feature 1..22: note = chemically synthesized
  source 1..22: mol_type = other DNA
atttcttactggtcttcaacag

SEQ ID NO: 60776 - DNA, 22 bp, synthetic construct
  misc_feature 1..22: note = chemically synthesized
  source 1..22: mol_type = other DNA
tttcttactggtcttcaacagg

SEQ ID NO: 60777 - DNA, 22 bp, synthetic construct
  misc_feature 1..22: note = chemically synthesized
  source 1..22: mol_type = other DNA
cttactggtcttcaacaggccc

SEQ ID NO: 60778 - DNA, 22 bp, synthetic construct
  misc_feature 1..22: note = chemically synthesized
  source 1..22: mol_type = other DNA
ttactggtcttcaacaggccct

SEQ ID NO: 60779 - DNA, 22 bp, synthetic construct
  misc_feature 1..22: note = chemically synthesized
  source 1..22: mol_type = other DNA
actggtcttcaacaggccctaa

SEQ ID NO: 60780 - DNA, 22 bp, synthetic construct
  misc_feature 1..22: note = chemically synthesized
  source 1..22: mol_type = other DNA
ctggtcttcaacaggccctaat

SEQ ID NO: 60781 - DNA, 22 bp, synthetic construct
  misc_feature 1..22: note = chemically synthesized
  source 1..22: mol_type = other DNA
gtcttcaacaggccctaattta

SEQ ID NO: 60782 - DNA, 22 bp, synthetic construct
  misc_feature 1..22: note = chemically synthesized
  source 1..22: mol_type = other DNA
caacaggccctaatttactttt

SEQ ID NO: 60783 - DNA, 22 bp, synthetic construct
  misc_feature 1..22: note = chemically synthesized
  source 1..22: mol_type = other DNA
aacaggccctaatttacttttc

SEQ ID NO: 60784 - DNA, 22 bp, synthetic construct
  misc_feature 1..22: note = chemically synthesized
  source 1..22: mol_type = other DNA
atttacttttcagggaatctgc

SEQ ID NO: 60785 - DNA, 22 bp, synthetic construct
  misc_feature 1..22: note = chemically synthesized
  source 1..22: mol_type = other DNA
acttttcagggaatctgccaaa

SEQ ID NO: 60786 - DNA, 22 bp, synthetic construct
  misc_feature 1..22: note = chemically synthesized
  source 1..22: mol_type = other DNA
cttttcagggaatctgccaaat

SEQ ID NO: 60787 - DNA, 22 bp, synthetic construct
  misc_feature 1..22: note = chemically synthesized
  source 1..22: mol_type = other DNA
ttcagggaatctgccaaattta

SEQ ID NO: 60788 - DNA, 22 bp, synthetic construct
  misc_feature 1..22: note = chemically synthesized
  source 1..22: mol_type = other DNA
tcagggaatctgccaaatttaa

SEQ ID NO: 60789 - DNA, 22 bp, synthetic construct
  misc_feature 1..22: note = chemically synthesized
  source 1..22: mol_type = other DNA
cagggaatctgccaaatttaac

SEQ ID NO: 60790 - DNA, 22 bp, synthetic construct
  misc_feature 1..22: note = chemically synthesized
  source 1..22: mol_type = other DNA
agggaatctgccaaatttaaca

SEQ ID NO: 60791 - DNA, 22 bp, synthetic construct
  misc_feature 1..22: note = chemically synthesized
  source 1..22: mol_type = other DNA
ccaaatttaacaaattaacacg

SEQ ID NO: 60792 - DNA, 22 bp, synthetic construct
  misc_feature 1..22: note = chemically synthesized
  source 1..22: mol_type = other DNA
aacaaattaacacgatgtccta

SEQ ID NO: 60793 - DNA, 22 bp, synthetic construct
  misc_feature 1..22: note = chemically synthesized
  source 1..22: mol_type = other DNA
acaaattaacacgatgtcctag

SEQ ID NO: 60794 - DNA, 22 bp, synthetic construct
  misc_feature 1..22: note = chemically synthesized
  source 1..22: mol_type = other DNA
acacgatgtcctaggaaagctg

SEQ ID NO: 60795 - DNA, 22 bp, synthetic construct
  misc_feature 1..22: note = chemically synthesized
  source 1..22: mol_type = other DNA
ggaaagctgttcatttaaatac

SEQ ID NO: 60796 - DNA, 22 bp, synthetic construct
  misc_feature 1..22: note = chemically synthesized
  source 1..22: mol_type = other DNA
ttcatttaaatacattcatttg

SEQ ID NO: 60797 - DNA, 22 bp, synthetic construct
  misc_feature 1..22: note = chemically synthesized
  source 1..22: mol_type = other DNA
atttaaatacattcatttgcaa

SEQ ID NO: 60798 - DNA, 22 bp, synthetic construct
  misc_feature 1..22: note = chemically synthesized
  source 1..22: mol_type = other DNA
aaatacattcatttgcaaacct

SEQ ID NO: 60799 - DNA, 22 bp, synthetic construct
  misc_feature 1..22: note = chemically synthesized
  source 1..22: mol_type = other DNA
aatacattcatttgcaaaccta

SEQ ID NO: 60800 - DNA, 22 bp, synthetic construct
  misc_feature 1..22: note = chemically synthesized
  source 1..22: mol_type = other DNA
atttgcaaacctaatagataac

SEQ ID NO: 60801 - DNA, 22 bp, synthetic construct
  misc_feature 1..22: note = chemically synthesized
  source 1..22: mol_type = other DNA
gcaaacctaatagataactgca

SEQ ID NO: 60802 - DNA, 22 bp, synthetic construct
  misc_feature 1..22: note = chemically synthesized
  source 1..22: mol_type = other DNA
caaacctaatagataactgcag

SEQ ID NO: 60803 - DNA, 22 bp, synthetic construct
  misc_feature 1..22: note = chemically synthesized
  source 1..22: mol_type = other DNA
atagataactgcagttgatctc

SEQ ID NO: 60804 - DNA, 22 bp, synthetic construct
  misc_feature 1..22: note = chemically synthesized
  source 1..22: mol_type = other DNA
cagttgatctcttttataggtt

SEQ ID NO: 60805 - DNA, 22 bp, synthetic construct
  misc_feature 1..22: note = chemically synthesized
  source 1..22: mol_type = other DNA
atctcttttataggttcagagt

SEQ ID NO: 60806 - DNA, 22 bp, synthetic construct
  misc_feature 1..22: note = chemically synthesized
  source 1..22: mol_type = other DNA
ttttataggttcagagttttga

SEQ ID NO: 60807 - DNA, 22 bp, synthetic construct
  misc_feature 1..22: note = chemically synthesized
  source 1..22: mol_type = other DNA
ttataggttcagagttttgaat

SEQ ID NO: 60808 - DNA, 22 bp, synthetic construct
  misc_feature 1..22: note = chemically synthesized
  source 1..22: mol_type = other DNA
tataggttcagagttttgaata

SEQ ID NO: 60809 - DNA, 22 bp, synthetic construct
  misc_feature 1..22: note = chemically synthesized
  source 1..22: mol_type = other DNA
ataggttcagagttttgaatat

SEQ ID NO: 60810 - DNA, 22 bp, synthetic construct
  misc_feature 1..22: note = chemically synthesized
  source 1..22: mol_type = other DNA
taggttcagagttttgaatatg

SEQ ID NO: 60811 - DNA, 22 bp, synthetic construct
  misc_feature 1..22: note = chemically synthesized
  source 1..22: mol_type = other DNA
agagttttgaatatgttttttt

SEQ ID NO: 60812 - DNA, 22 bp, synthetic construct
  misc_feature 1..22: note = chemically synthesized
  source 1..22: mol_type = other DNA
tgaatatgtttttttttgtttt

SEQ ID NO: 60813 - DNA, 22 bp, synthetic construct
  misc_feature 1..22: note = chemically synthesized
  source 1..22: mol_type = other DNA
gaatatgtttttttttgttttt

SEQ ID NO: 60814 - DNA, 22 bp, synthetic construct
  misc_feature 1..22: note = chemically synthesized
  source 1..22: mol_type = other DNA
aatatgtttttttttgtttttt

SEQ ID NO: 60815 - DNA, 22 bp, synthetic construct
  misc_feature 1..22: note = chemically synthesized
  source 1..22: mol_type = other DNA
ttttttgttttttttttttgag

SEQ ID NO: 60816 - DNA, 22 bp, synthetic construct
  misc_feature 1..22: note = chemically synthesized
  source 1..22: mol_type = other DNA
tttttgttttttttttttgaga

SEQ ID NO: 60817 - DNA, 22 bp, synthetic construct
  misc_feature 1..22: note = chemically synthesized
  source 1..22: mol_type = other DNA
ttttgttttttttttttgagat

SEQ ID NO: 60818 - DNA, 22 bp, synthetic construct
  misc_feature 1..22: note = chemically synthesized
  source 1..22: mol_type = other DNA
tttgttttttttttttgagatg

SEQ ID NO: 60819 - DNA, 22 bp, synthetic construct
  misc_feature 1..22: note = chemically synthesized
  source 1..22: mol_type = other DNA
ttgttttttttttttgagatgg

SEQ ID NO: 60820 - DNA, 22 bp, synthetic construct
  misc_feature 1..22: note = chemically synthesized
  source 1..22: mol_type = other DNA
tgttttttttttttgagatgga

SEQ ID NO: 60821 - DNA, 22 bp, synthetic construct
  misc_feature 1..22: note = chemically synthesized
  source 1..22: mol_type = other DNA
gttttttttttttgagatggag

SEQ ID NO: 60822 - DNA, 22 bp, synthetic construct
  misc_feature 1..22: note = chemically synthesized
  source 1..22: mol_type = other DNA
ttttttttttttgagatggagt

SEQ ID NO: 60823 - DNA, 22 bp, synthetic construct
  misc_feature 1..22: note = chemically synthesized
  source 1..22: mol_type = other DNA
tttttttttgagatggagtctc

SEQ ID NO: 60824 - DNA, 22 bp, synthetic construct
  misc_feature 1..22: note = chemically synthesized
  source 1..22: mol_type = other DNA
ttttttttgagatggagtctcg

SEQ ID NO: 60825 - DNA, 22 bp, synthetic construct
  misc_feature 1..22: note = chemically synthesized
  source 1..22: mol_type = other DNA
tttttttgagatggagtctcgc

SEQ ID NO: 60826 - DNA, 22 bp, synthetic construct
  misc_feature 1..22: note = chemically synthesized
  source 1..22: mol_type = other DNA
ttttttgagatggagtctcgct

SEQ ID NO: 60827 - DNA, 22 bp, synthetic construct
  misc_feature 1..22: note = chemically synthesized
  source 1..22: mol_type = other DNA
tttttgagatggagtctcgctc

SEQ ID NO: 60828 - DNA, 22 bp, synthetic construct
  misc_feature 1..22: note = chemically synthesized
  source 1..22: mol_type = other DNA
ttttgagatggagtctcgctct

SEQ ID NO: 60829 - DNA, 22 bp, synthetic construct
  misc_feature 1..22: note = chemically synthesized
  source 1..22: mol_type = other DNA
tttgagatggagtctcgctctg

SEQ ID NO: 60830 - DNA, 22 bp, synthetic construct
  misc_feature 1..22: note = chemically synthesized
  source 1..22: mol_type = other DNA
ttgagatggagtctcgctctgt

SEQ ID NO: 60831 - DNA, 22 bp, synthetic construct
  misc_feature 1..22: note = chemically synthesized
  source 1..22: mol_type = other DNA
tgagatggagtctcgctctgtg

SEQ ID NO: 60832 - DNA, 22 bp, synthetic construct
  misc_feature 1..22: note = chemically synthesized
  source 1..22: mol_type = other DNA
gagatggagtctcgctctgtga

SEQ ID NO: 60833 - DNA, 22 bp, synthetic construct
  misc_feature 1..22: note = chemically synthesized
  source 1..22: mol_type = other DNA
agatggagtctcgctctgtgac

SEQ ID NO: 60834 - DNA, 22 bp, synthetic construct
  misc_feature 1..22: note = chemically synthesized
  source 1..22: mol_type = other DNA
gctctgtgacccaggctagagt

SEQ ID NO: 60835 - DNA, 22 bp, synthetic construct
  misc_feature 1..22: note = chemically synthesized
  source 1..22: mol_type = other DNA
tgtgacccaggctagagtgcag

SEQ ID NO: 60836 - DNA, 22 bp, synthetic construct
  misc_feature 1..22: note = chemically synthesized
  source 1..22: mol_type = other DNA
tgacccaggctagagtgcagtg

SEQ ID NO: 60837 - DNA, 22 bp, synthetic construct
  misc_feature 1..22: note = chemically synthesized
  source 1..22: mol_type = other DNA
gagtgcagtggtgcgatctcgg

SEQ ID NO: 60838 - DNA, 22 bp, synthetic construct
  misc_feature 1..22: note = chemically synthesized
  source 1..22: mol_type = other DNA
ggctcactgcaagctccacctc

SEQ ID NO: 60839 - DNA, 22 bp, synthetic construct
  misc_feature 1..22: note = chemically synthesized
  source 1..22: mol_type = other DNA
actgcaagctccacctcctggg

SEQ ID NO: 60840 - DNA, 22 bp, synthetic construct
  misc_feature 1..22: note = chemically synthesized
  source 1..22: mol_type = other DNA
caagctccacctcctgggttca

SEQ ID NO: 60841 - DNA, 22 bp, synthetic construct
  misc_feature 1..22: note = chemically synthesized
  source 1..22: mol_type = other DNA
cacctcctgggttcacgccatt

SEQ ID NO: 60842 - DNA, 22 bp, synthetic construct
  misc_feature 1..22: note = chemically synthesized
  source 1..22: mol_type = other DNA
ctgggttcacgccattctcctg

SEQ ID NO: 60843 - DNA, 22 bp, synthetic construct
  misc_feature 1..22: note = chemically synthesized
  source 1..22: mol_type = other DNA
ggttcacgccattctcctgcct

SEQ ID NO: 60844 - DNA, 22 bp, synthetic construct
  misc_feature 1..22: note = chemically synthesized
  source 1..22: mol_type = other DNA
acgccattctcctgcctcagcc

SEQ ID NO: 60845 - DNA, 22 bp, synthetic construct
  misc_feature 1..22: note = chemically synthesized
  source 1..22: mol_type = other DNA
tcctgcctcagcctctccgagt

SEQ ID NO: 60846 - DNA, 22 bp, synthetic construct
  misc_feature 1..22: note = chemically synthesized
  source 1..22: mol_type = other DNA
ctgcctcagcctctccgagtag

SEQ ID NO: 60847 - DNA, 22 bp, synthetic construct
  misc_feature 1..22: note = chemically synthesized
  source 1..22: mol_type = other DNA
cctcagcctctccgagtagctg

SEQ ID NO: 60848 - DNA, 22 bp, synthetic construct
  misc_feature 1..22: note = chemically synthesized
  source 1..22: mol_type = other DNA
agcctctccgagtagctgggac

SEQ ID NO: 60849 - DNA, 22 bp, synthetic construct
  misc_feature 1..22: note = chemically synthesized
  source 1..22: mol_type = other DNA
tccgagtagctgggactacagg

SEQ ID NO: 60850 - DNA, 22 bp, synthetic construct
  misc_feature 1..22: note = chemically synthesized
  source 1..22: mol_type = other DNA
cgagtagctgggactacaggcg

SEQ ID NO: 60851 - DNA, 22 bp, synthetic construct
  misc_feature 1..22: note = chemically synthesized
  source 1..22: mol_type = other DNA
ggactacaggcgcccgccacca

SEQ ID NO: 60852 - DNA, 22 bp, synthetic construct
  misc_feature 1..22: note = chemically synthesized
  source 1..22: mol_type = other DNA
caggcgcccgccaccatgcccg

SEQ ID NO: 60853 - DNA, 22 bp, synthetic construct
  misc_feature 1..22: note = chemically synthesized
  source 1..22: mol_type = other DNA
attttttgtatttttagcagag

SEQ ID NO: 60854 - DNA, 22 bp, synthetic construct
  misc_feature 1..22: note = chemically synthesized
  source 1..22: mol_type = other DNA
tttgtatttttagcagagacgg

SEQ ID NO: 60855 - DNA, 22 bp, synthetic construct
  misc_feature 1..22: note = chemically synthesized
  source 1..22: mol_type = other DNA
ttgtatttttagcagagacggg

SEQ ID NO: 60856 - DNA, 22 bp, synthetic construct
  misc_feature 1..22: note = chemically synthesized
  source 1..22: mol_type = other DNA
tgtatttttagcagagacgggg

SEQ ID NO: 60857 - DNA, 22 bp, synthetic construct
  misc_feature 1..22: note = chemically synthesized
  source 1..22: mol_type = other DNA
gtatttttagcagagacggggt

SEQ ID NO: 60858 - DNA, 22 bp, synthetic construct
  misc_feature 1..22: note = chemically synthesized
  source 1..22: mol_type = other DNA
tatttttagcagagacggggtt

SEQ ID NO: 60859 - DNA, 22 bp, synthetic construct
  misc_feature 1..22: note = chemically synthesized
  source 1..22: mol_type = other DNA
ttagcagagacggggtttcacc

SEQ ID NO: 60860 - DNA, 22 bp, synthetic construct
  misc_feature 1..22: note = chemically synthesized
  source 1..22: mol_type = other DNA
tagcagagacggggtttcaccg

SEQ ID NO: 60861 - DNA, 22 bp, synthetic construct
  misc_feature 1..22: note = chemically synthesized
  source 1..22: mol_type = other DNA
agcagagacggggtttcaccgt

SEQ ID NO: 60862 - DNA, 22 bp, synthetic construct
  misc_feature 1..22: note = chemically synthesized
  source 1..22: mol_type = other DNA
gcagagacggggtttcaccgtg

SEQ ID NO: 60863 - DNA, 22 bp, synthetic construct
  misc_feature 1..22: note = chemically synthesized
  source 1..22: mol_type = other DNA
caccgtggtcttgatctcctga

SEQ ID NO: 60864 - DNA, 22 bp, synthetic construct
  misc_feature 1..22: note = chemically synthesized
  source 1..22: mol_type = other DNA
accgtggtcttgatctcctgac

SEQ ID NO: 60865 - DNA, 22 bp, synthetic construct
  misc_feature 1..22: note = chemically synthesized
  source 1..22: mol_type = other DNA
gatctcctgacctcgtgatccg

SEQ ID NO: 60866 - DNA, 22 bp, synthetic construct
  misc_feature 1..22: note = chemically synthesized
  source 1..22: mol_type = other DNA
atctcctgacctcgtgatccgc

SEQ ID NO: 60867 - DNA, 22 bp, synthetic construct
  misc_feature 1..22: note = chemically synthesized
  source 1..22: mol_type = other DNA
ctgacctcgtgatccgcccgcc

SEQ ID NO: 60868 - DNA, 22 bp, synthetic construct
  misc_feature 1..22: note = chemically synthesized
  source 1..22: mol_type = other DNA
acctcgtgatccgcccgcctcg

SEQ ID NO: 60869 - DNA, 22 bp, synthetic construct
  misc_feature 1..22: note = chemically synthesized
  source 1..22: mol_type = other DNA
gtgatccgcccgcctcggcctc

SEQ ID NO: 60870 - DNA, 22 bp, synthetic construct
  misc_feature 1..22: note = chemically synthesized
  source 1..22: mol_type = other DNA
ggcctcccaaagcgctgggatt

SEQ ID NO: 60871 - DNA, 22 bp, synthetic construct
  misc_feature 1..22: note = chemically synthesized
  source 1..22: mol_type = other DNA
ccaaagcgctgggattacaagg

SEQ ID NO: 60872 - DNA, 22 bp, synthetic construct
  misc_feature 1..22: note = chemically synthesized
  source 1..22: mol_type = other DNA
ggattacaagggtgagccaccg

SEQ ID NO: 60873 - DNA, 22 bp, synthetic construct
  misc_feature 1..22: note = chemically synthesized
  source 1..22: mol_type = other DNA
caagggtgagccaccgcaccct

SEQ ID NO: 60874 - DNA, 22 bp, synthetic construct
  misc_feature 1..22: note = chemically synthesized
  source 1..22: mol_type = other DNA
cctgaatatgtgttttcttaga

SEQ ID NO: 60875 - DNA, 22 bp, synthetic construct
  misc_feature 1..22: note = chemically synthesized
  source 1..22: mol_type = other DNA
aatatgtgttttcttagatcca

SEQ ID NO: 60876 - DNA, 22 bp, synthetic construct
  misc_feature 1..22: note = chemically synthesized
  source 1..22: mol_type = other DNA
tcttagatccaattaacaaggg

SEQ ID NO: 60877 - DNA, 22 bp, synthetic construct
  misc_feature 1..22: note = chemically synthesized
  source 1..22: mol_type = other DNA
cttagatccaattaacaagggt

SEQ ID NO: 60878 - DNA, 22 bp, synthetic construct
  misc_feature 1..22: note = chemically synthesized
  source 1..22: mol_type = other DNA
ttagatccaattaacaagggta

SEQ ID NO: 60879 - DNA, 22 bp, synthetic construct
  misc_feature 1..22: note = chemically synthesized
  source 1..22: mol_type = other DNA
agatccaattaacaagggtaag

SEQ ID NO: 60880 - DNA, 22 bp, synthetic construct
  misc_feature 1..22: note = chemically synthesized
  source 1..22: mol_type = other DNA
gatccaattaacaagggtaaga

SEQ ID NO: 60881 - DNA, 22 bp, synthetic construct
  misc_feature 1..22: note = chemically synthesized
  source 1..22: mol_type = other DNA
acaagggtaagacaagatttaa

SEQ ID NO: 60882 - DNA, 22 bp, synthetic construct
  misc_feature 1..22: note = chemically synthesized
  source 1..22: mol_type = other DNA
aagttaagcataagaaagattt

SEQ ID NO: 60883 - DNA, 22 bp, synthetic construct
  misc_feature 1..22: note = chemically synthesized
  source 1..22: mol_type = other DNA
agttaagcataagaaagatttt

SEQ ID NO: 60884 - DNA, 22 bp, synthetic construct
  misc_feature 1..22: note = chemically synthesized
  source 1..22: mol_type = other DNA
agcataagaaagattttgtggg

SEQ ID NO: 60885 - DNA, 22 bp, synthetic construct
  misc_feature 1..22: note = chemically synthesized
  source 1..22: mol_type = other DNA
tgtgggaggcactggaatataa

SEQ ID NO: 60886 - DNA, 22 bp, synthetic construct
  misc_feature 1..22: note = chemically synthesized
  source 1..22: mol_type = other DNA
gtgggaggcactggaatataag

SEQ ID NO: 60887 - DNA, 22 bp, synthetic construct
  misc_feature 1..22: note = chemically synthesized
  source 1..22: mol_type = other DNA
tgggaggcactggaatataaga

SEQ ID NO: 60888 - DNA, 22 bp, synthetic construct
  misc_feature 1..22: note = chemically synthesized
  source 1..22: mol_type = other DNA
gaatataagaccttaacaaaac

SEQ ID NO: 60889 - DNA, 22 bp, synthetic construct
  misc_feature 1..22: note = chemically synthesized
  source 1..22: mol_type = other DNA
aacaaaactgtggaatttctcc

SEQ ID NO: 60890 - DNA, 22 bp, synthetic construct
  misc_feature 1..22: note = chemically synthesized
  source 1..22: mol_type = other DNA
acaaaactgtggaatttctccc

SEQ ID NO: 60891 - DNA, 22 bp, synthetic construct
  misc_feature 1..22: note = chemically synthesized
  source 1..22: mol_type = other DNA
tggaatttctcccctggagatt

SEQ ID NO: 60892 - DNA, 22 bp, synthetic construct
  misc_feature 1..22: note = chemically synthesized
  source 1..22: mol_type = other DNA
ctcccctggagatttgtaagaa

SEQ ID NO: 60893 - DNA, 22 bp, synthetic construct
  misc_feature 1..22: note = chemically synthesized
  source 1..22: mol_type = other DNA
tcccctggagatttgtaagaac

SEQ ID NO: 60894 - DNA, 22 bp, synthetic construct
  misc_feature 1..22: note = chemically synthesized
  source 1..22: mol_type = other DNA
ccctggagatttgtaagaacgg

SEQ ID NO: 60895 - DNA, 22 bp, synthetic construct
  misc_feature 1..22: note = chemically synthesized
  source 1..22: mol_type = other DNA
gagatttgtaagaacggaacat

SEQ ID NO: 60896 - DNA, 22 bp, synthetic construct
  misc_feature 1..22: note = chemically synthesized
  source 1..22: mol_type = other DNA
gtaagaacggaacatagcagca

SEQ ID NO: 60897 - DNA, 22 bp, synthetic construct
  misc_feature 1..22: note = chemically synthesized
  source 1..22: mol_type = other DNA
taagaacggaacatagcagcat

SEQ ID NO: 60898 - DNA, 22 bp, synthetic construct
  misc_feature 1..22: note = chemically synthesized
  source 1..22: mol_type = other DNA
aaagaagaatgttgagaacaag

SEQ ID NO: 60899 - DNA, 22 bp, synthetic construct
  misc_feature 1..22: note = chemically synthesized
  source 1..22: mol_type = other DNA
agaacaagggagataatggttt

SEQ ID NO: 60900 - DNA, 22 bp, synthetic construct
  misc_feature 1..22: note = chemically synthesized
  source 1..22: mol_type = other DNA
catggtaatcacaaaagtaaca

SEQ ID NO: 60901 - DNA, 22 bp, synthetic construct
  misc_feature 1..22: note = chemically synthesized
  source 1..22: mol_type = other DNA
atggtaatcacaaaagtaacac

SEQ ID NO: 60902 - DNA, 22 bp, synthetic construct
  misc_feature 1..22: note = chemically synthesized
  source 1..22: mol_type = other DNA
agtactgggttccatgtttgag

SEQ ID NO: 60903 - DNA, 22 bp, synthetic construct
  misc_feature 1..22: note = chemically synthesized
  source 1..22: mol_type = other DNA
gtactgggttccatgtttgagg

SEQ ID NO: 60904 - DNA, 22 bp, synthetic construct
  misc_feature 1..22: note = chemically synthesized
  source 1..22: mol_type = other DNA
ggttccatgtttgaggaagaac

SEQ ID NO: 60905 - DNA, 22 bp, synthetic construct
  misc_feature 1..22: note = chemically synthesized
  source 1..22: mol_type = other DNA
catgtttgaggaagaacctgga

SEQ ID NO: 60906 - DNA, 22 bp, synthetic construct
  misc_feature 1..22: note = chemically synthesized
  source 1..22: mol_type = other DNA
gaggaagaacctggaagccata

SEQ ID NO: 60907 - DNA, 22 bp, synthetic construct
  misc_feature 1..22: note = chemically synthesized
  source 1..22: mol_type = other DNA
aggaagaacctggaagccatat

SEQ ID NO: 60908 - DNA, 22 bp, synthetic construct
  misc_feature 1..22: note = chemically synthesized
  source 1..22: mol_type = other DNA
gaagccatatcacatgaaaaac

SEQ ID NO: 60909 - DNA, 22 bp, synthetic construct
  misc_feature 1..22: note = chemically synthesized
  source 1..22: mol_type = other DNA
ggaatgtttaggttagagagaa

SEQ ID NO: 60910 - DNA, 22 bp, synthetic construct
  misc_feature 1..22: note = chemically synthesized
  source 1..22: mol_type = other DNA
aggttagagagaataactgtgt

SEQ ID NO: 60911 - DNA, 22 bp, synthetic construct
  misc_feature 1..22: note = chemically synthesized
  source 1..22: mol_type = other DNA
ggttagagagaataactgtgtt

SEQ ID NO: 60912 - DNA, 22 bp, synthetic construct
  misc_feature 1..22: note = chemically synthesized
  source 1..22: mol_type = other DNA
gagagaataactgtgttcaaat

SEQ ID NO: 60913 - DNA, 22 bp, synthetic construct
  misc_feature 1..22: note = chemically synthesized
  source 1..22: mol_type = other DNA
tgttcaaatgtgtgacagaggg

SEQ ID NO: 60914 - DNA, 22 bp, synthetic construct
  misc_feature 1..22: note = chemically synthesized
  source 1..22: mol_type = other DNA
aaatgtgtgacagagggactag

SEQ ID NO: 60915 - DNA, 22 bp, synthetic construct
  misc_feature 1..22: note = chemically synthesized
  source 1..22: mol_type = other DNA
gattcatcacttactaactcct

SEQ ID NO: 60916 - DNA, 22 bp, synthetic construct
  misc_feature 1..22: note = chemically synthesized
  source 1..22: mol_type = other DNA
atcacttactaactcctgcaga

SEQ ID NO: 60917 - DNA, 22 bp, synthetic construct
  misc_feature 1..22: note = chemically synthesized
  source 1..22: mol_type = other DNA
actaactcctgcagaaagaact

SEQ ID NO: 60918 - DNA, 22 bp, synthetic construct
  misc_feature 1..22: note = chemically synthesized
  source 1..22: mol_type = other DNA
ctaactcctgcagaaagaactg

SEQ ID NO: 60919 - DNA, 22 bp, synthetic construct
  misc_feature 1..22: note = chemically synthesized
  source 1..22: mol_type = other DNA
actcctgcagaaagaactgaga

SEQ ID NO: 60920 - DNA, 22 bp, synthetic construct
  misc_feature 1..22: note = chemically synthesized
  source 1..22: mol_type = other DNA
ctgcagaaagaactgagaaaaa

SEQ ID NO: 60921 - DNA, 22 bp, synthetic construct
  misc_feature 1..22: note = chemically synthesized
  source 1..22: mol_type = other DNA
cagaaagaactgagaaaaatag

SEQ ID NO: 60922 - DNA, 22 bp, synthetic construct
  misc_feature 1..22: note = chemically synthesized
  source 1..22: mol_type = other DNA
agaaaaatagacagtattagag

SEQ ID NO: 60923 - DNA, 22 bp, synthetic construct
  misc_feature 1..22: note = chemically synthesized
  source 1..22: mol_type = other DNA
gagggggaccagtttcacacag

SEQ ID NO: 60924 - DNA, 22 bp, synthetic construct
  misc_feature 1..22: note = chemically synthesized
  source 1..22: mol_type = other DNA
cacacagacaaggaagaactat

SEQ ID NO: 60925 - DNA, 22 bp, synthetic construct
  misc_feature 1..22: note = chemically synthesized
  source 1..22: mol_type = other DNA
acacagacaaggaagaactatt

SEQ ID NO: 60926 - DNA, 22 bp, synthetic construct
  misc_feature 1..22: note = chemically synthesized
  source 1..22: mol_type = other DNA
ttcagcaatcaattccgttcaa

SEQ ID NO: 60927 - DNA, 22 bp, synthetic construct
  misc_feature 1..22: note = chemically synthesized
  source 1..22: mol_type = other DNA
agcaatcaattccgttcaaaga

SEQ ID NO: 60928 - DNA, 22 bp, synthetic construct
  misc_feature 1..22: note = chemically synthesized
  source 1..22: mol_type = other DNA
cgttcaaagataaaatggactg

SEQ ID NO: 60929 - DNA, 22 bp, synthetic construct
  misc_feature 1..22: note = chemically synthesized
  source 1..22: mol_type = other DNA
aaagataaaatggactgttata

SEQ ID NO: 60930 - DNA, 22 bp, synthetic construct
  misc_feature 1..22: note = chemically synthesized
  source 1..22: mol_type = other DNA
ttatagtgggggtgagctccct

SEQ ID NO: 60931 - DNA, 22 bp, synthetic construct
  misc_feature 1..22: note = chemically synthesized
  source 1..22: mol_type = other DNA
tagtgggggtgagctccctacc

SEQ ID NO: 60932 - DNA, 22 bp, synthetic construct
  misc_feature 1..22: note = chemically synthesized
  source 1..22: mol_type = other DNA
cctacctctgagggtatttcaa

SEQ ID NO: 60933 - DNA, 22 bp, synthetic construct
  misc_feature 1..22: note = chemically synthesized
  source 1..22: mol_type = other DNA
cctctgagggtatttcaagtag

SEQ ID NO: 60934 - DNA, 22 bp, synthetic construct
  misc_feature 1..22: note = chemically synthesized
  source 1..22: mol_type = other DNA
tgagggtatttcaagtagagat

SEQ ID NO: 60935 - DNA, 22 bp, synthetic construct
  misc_feature 1..22: note = chemically synthesized
  source 1..22: mol_type = other DNA
agggtatttcaagtagagatag

SEQ ID NO: 60936 - DNA, 22 bp, synthetic construct
  misc_feature 1..22: note = chemically synthesized
  source 1..22: mol_type = other DNA
caagtagagataggaggacctc

SEQ ID NO: 60937 - DNA, 22 bp, synthetic construct
  misc_feature 1..22: note = chemically synthesized
  source 1..22: mol_type = other DNA
aagtagagataggaggacctcc

SEQ ID NO: 60938 - DNA, 22 bp, synthetic construct
  misc_feature 1..22: note = chemically synthesized
  source 1..22: mol_type = other DNA
ctggtaggaaatttgcatacgg

SEQ ID NO: 60939 - DNA, 22 bp, synthetic construct
  misc_feature 1..22: note = chemically synthesized
  source 1..22: mol_type = other DNA
gtaggaaatttgcatacggtgg

SEQ ID NO: 60940 - DNA, 22 bp, synthetic construct
  misc_feature 1..22: note = chemically synthesized
  source 1..22: mol_type = other DNA
gcatacggtgggagattgtacg

SEQ ID NO: 60941 - DNA, 22 bp, synthetic construct
  misc_feature 1..22: note = chemically synthesized
  source 1..22: mol_type = other DNA
catacggtgggagattgtacgt

SEQ ID NO: 60942 - DNA, 22 bp, synthetic construct
  misc_feature 1..22: note = chemically synthesized
  source 1..22: mol_type = other DNA
tacgtgatatggcacctccatc

SEQ ID NO: 60943 - DNA, 22 bp, synthetic construct
  misc_feature 1..22: note = chemically synthesized
  source 1..22: mol_type = other DNA
catctgaaagagtctatattga

SEQ ID NO: 60944 - DNA, 22 bp, synthetic construct
  misc_feature 1..22: note = chemically synthesized
  source 1..22: mol_type = other DNA
aaagagtctatattgagggcag

SEQ ID NO: 60945 - DNA, 22 bp, synthetic construct
  misc_feature 1..22: note = chemically synthesized
  source 1..22: mol_type = other DNA
tattgagggcaggctggagtca

SEQ ID NO: 60946 - DNA, 22 bp, synthetic construct
  misc_feature 1..22: note = chemically synthesized
  source 1..22: mol_type = other DNA
agggcaggctggagtcacacat

SEQ ID NO: 60947 - DNA, 22 bp, synthetic construct
  misc_feature 1..22: note = chemically synthesized
  source 1..22: mol_type = other DNA
gagtcacacatgggaataagcc

SEQ ID NO: 60948 - DNA, 22 bp, synthetic construct
  misc_feature 1..22: note = chemically synthesized
  source 1..22: mol_type = other DNA
ccatctgccatctgtgatttaa

SEQ ID NO: 60949 - DNA, 22 bp, synthetic construct
  misc_feature 1..22: note = chemically synthesized
  source 1..22: mol_type = other DNA
ccatctgtgatttaattccaca

SEQ ID NO: 60950 - DNA, 22 bp, synthetic construct
  misc_feature 1..22: note = chemically synthesized
  source 1..22: mol_type = other DNA
tgatttaattccacagtcgcag

SEQ ID NO: 60951 - DNA, 22 bp, synthetic construct
  misc_feature 1..22: note = chemically synthesized
  source 1..22: mol_type = other DNA
aattccacagtcgcagaacgga

SEQ ID NO: 60952 - DNA, 22 bp, synthetic construct
  misc_feature 1..22: note = chemically synthesized
  source 1..22: mol_type = other DNA
attccacagtcgcagaacggat

SEQ ID NO: 60953 - DNA, 22 bp, synthetic construct
  misc_feature 1..22: note = chemically synthesized
  source 1..22: mol_type = other DNA
cacagtcgcagaacggatggca

SEQ ID NO: 60954 - DNA, 22 bp, synthetic construct
  misc_feature 1..22: note = chemically synthesized
  source 1..22: mol_type = other DNA
ctccaaacccacctctagcaaa

SEQ ID NO: 60955 - DNA, 22 bp, synthetic construct
  misc_feature 1..22: note = chemically synthesized
  source 1..22: mol_type = other DNA
caaacccacctctagcaaaggt

SEQ ID NO: 60956 - DNA, 22 bp, synthetic construct
  misc_feature 1..22: note = chemically synthesized
  source 1..22: mol_type = other DNA
tagcaaaggtcccaaatccttc

SEQ ID NO: 60957 - DNA, 22 bp, synthetic construct
  misc_feature 1..22: note = chemically synthesized
  source 1..22: mol_type = other DNA
gcaaaggtcccaaatccttcct

SEQ ID NO: 60958 - DNA, 22 bp, synthetic construct
  misc_feature 1..22: note = chemically synthesized
  source 1..22: mol_type = other DNA
cctatctctcacagtcatgctt

SEQ ID NO: 60959 - DNA, 22 bp, synthetic construct
  misc_feature 1..22: note = chemically synthesized
  source 1..22: mol_type = other DNA
ctatctctcacagtcatgcttt

SEQ ID NO: 60960 - DNA, 22 bp, synthetic construct
  misc_feature 1..22: note = chemically synthesized
  source 1..22: mol_type = other DNA
tctctcacagtcatgctttctt

SEQ ID NO: 60961 - DNA, 22 bp, synthetic construct
  misc_feature 1..22: note = chemically synthesized
  source 1..22: mol_type = other DNA
tcacagtcatgctttcttccac

SEQ ID NO: 60962 - DNA, 22 bp, synthetic construct
  misc_feature 1..22: note = chemically synthesized
  source 1..22: mol_type = other DNA
acagtcatgctttcttccactc

SEQ ID NO: 60963 - DNA, 22 bp, synthetic construct
  misc_feature 1..22: note = chemically synthesized
  source 1..22: mol_type = other DNA
tcttccactcaggcattgctgt

SEQ ID NO: 60964 - DNA, 22 bp, synthetic construct
  misc_feature 1..22: note = chemically synthesized
  source 1..22: mol_type = other DNA
cttccactcaggcattgctgtt

SEQ ID NO: 60965 - DNA, 22 bp, synthetic construct
  misc_feature 1..22: note = chemically synthesized
  source 1..22: mol_type = other DNA
ttccactcaggcattgctgttg

SEQ ID NO: 60966 - DNA, 22 bp, synthetic construct
  misc_feature 1..22: note = chemically synthesized
  source 1..22: mol_type = other DNA
ccactcaggcattgctgttgca

SEQ ID NO: 60967 - DNA, 22 bp, synthetic construct
  misc_feature 1..22: note = chemically synthesized
  source 1..22: mol_type = other DNA
cactcaggcattgctgttgcag

SEQ ID NO: 60968 - DNA, 22 bp, synthetic construct
  misc_feature 1..22: note = chemically synthesized
  source 1..22: mol_type = other DNA
aggcattgctgttgcagaaact

SEQ ID NO: 60969 - DNA, 22 bp, synthetic construct
  misc_feature 1..22: note = chemically synthesized
  source 1..22: mol_type = other DNA
ctgttgcagaaactttcagcca

SEQ ID NO: 60970 - DNA, 22 bp, synthetic construct
  misc_feature 1..22: note = chemically synthesized
  source 1..22: mol_type = other DNA
ttgcagaaactttcagccacat

SEQ ID NO: 60971 - DNA, 22 bp, synthetic construct
  misc_feature 1..22: note = chemically synthesized
  source 1..22: mol_type = other DNA
cagaaactttcagccacatcca

SEQ ID NO: 60972 - DNA, 22 bp, synthetic construct
  misc_feature 1..22: note = chemically synthesized
  source 1..22: mol_type = other DNA
tcagccacatccacagcatcta

SEQ ID NO: 60973 - DNA, 22 bp, synthetic construct
  misc_feature 1..22: note = chemically synthesized
  source 1..22: mol_type = other DNA
cagccacatccacagcatctat

SEQ ID NO: 60974 - DNA, 22 bp, synthetic construct
  misc_feature 1..22: note = chemically synthesized
  source 1..22: mol_type = other DNA
agccacatccacagcatctata

SEQ ID NO: 60975 - DNA, 22 bp, synthetic construct
  misc_feature 1..22: note = chemically synthesized
  source 1..22: mol_type = other DNA
taatgccagcctcaagaaatat

SEQ ID NO: 60976 - DNA, 22 bp, synthetic construct
  misc_feature 1..22: note = chemically synthesized
  source 1..22: mol_type = other DNA
aagaaatattttctcattacct

SEQ ID NO: 60977 - DNA, 22 bp, synthetic construct
  misc_feature 1..22: note = chemically synthesized
  source 1..22: mol_type = other DNA
tctcattaccttcttcctgttc

SEQ ID NO: 60978 - DNA, 22 bp, synthetic construct
  misc_feature 1..22: note = chemically synthesized
  source 1..22: mol_type = other DNA
ctcattaccttcttcctgttca

SEQ ID NO: 60979 - DNA, 22 bp, synthetic construct
  misc_feature 1..22: note = chemically synthesized
  source 1..22: mol_type = other DNA
tcattaccttcttcctgttcag

SEQ ID NO: 60980 - DNA, 22 bp, synthetic construct
  misc_feature 1..22: note = chemically synthesized
  source 1..22: mol_type = other DNA
attaccttcttcctgttcagct

SEQ ID NO: 60981 - DNA, 22 bp, synthetic construct
  misc_feature 1..22: note = chemically synthesized
  source 1..22: mol_type = other DNA
ccttcttcctgttcagcttcgc

SEQ ID NO: 60982 - DNA, 22 bp, synthetic construct
  misc_feature 1..22: note = chemically synthesized
  source 1..22: mol_type = other DNA
cttcctgttcagcttcgccatc

SEQ ID NO: 60983 - DNA, 22 bp, synthetic construct
  misc_feature 1..22: note = chemically synthesized
  source 1..22: mol_type = other DNA
ttcctgttcagcttcgccatcg

SEQ ID NO: 60984 - DNA, 22 bp, synthetic construct
  misc_feature 1..22: note = chemically synthesized
  source 1..22: mol_type = other DNA
cctgttcagcttcgccatcgga

SEQ ID NO: 60985 - DNA, 22 bp, synthetic construct
  misc_feature 1..22: note = chemically synthesized
  source 1..22: mol_type = other DNA
ctgttcagcttcgccatcggat

SEQ ID NO: 60986 - DNA, 22 bp, synthetic construct
  misc_feature 1..22: note = chemically synthesized
  source 1..22: mol_type = other DNA
ttcagcttcgccatcggatttt

SEQ ID NO: 60987 - DNA, 22 bp, synthetic construct
  misc_feature 1..22: note = chemically synthesized
  source 1..22: mol_type = other DNA
agcttcgccatcggattttatc

SEQ ID NO: 60988 - DNA, 22 bp, synthetic construct
  misc_feature 1..22: note = chemically synthesized
  source 1..22: mol_type = other DNA
cgccatcggattttatctgctg

SEQ ID NO: 60989 - DNA, 22 bp, synthetic construct
  misc_feature 1..22: note = chemically synthesized
  source 1..22: mol_type = other DNA
gccatcggattttatctgctgc

SEQ ID NO: 60990 - DNA, 22 bp, synthetic construct
  misc_feature 1..22: note = chemically synthesized
  source 1..22: mol_type = other DNA
tatctgctgctcaagggactgg

SEQ ID NO: 60991 - DNA, 22 bp, synthetic construct
  misc_feature 1..22: note = chemically synthesized
  source 1..22: mol_type = other DNA
atctgctgctcaagggactggg

SEQ ID NO: 60992 - DNA, 22 bp, synthetic construct
  misc_feature 1..22: note = chemically synthesized
  source 1..22: mol_type = other DNA
tctgctgctcaagggactgggt

SEQ ID NO: 60993 - DNA, 22 bp, synthetic construct
  misc_feature 1..22: note = chemically synthesized
  source 1..22: mol_type = other DNA
ctgctcaagggactgggtgtag

SEQ ID NO: 60994 - DNA, 22 bp, synthetic construct
  misc_feature 1..22: note = chemically synthesized
  source 1..22: mol_type = other DNA
ctcaagggactgggtgtagacc

SEQ ID NO: 60995 - DNA, 22 bp, synthetic construct
  misc_feature 1..22: note = chemically synthesized
  source 1..22: mol_type = other DNA
aagggactgggtgtagacctcc

SEQ ID NO: 60996 - DNA, 22 bp, synthetic construct
  misc_feature 1..22: note = chemically synthesized
  source 1..22: mol_type = other DNA
ggtgtagacctcctgtggactc

SEQ ID NO: 60997 - DNA, 22 bp, synthetic construct
  misc_feature 1..22: note = chemically synthesized
  source 1..22: mol_type = other DNA
ctgtggactctggagaaagccc

SEQ ID NO: 60998 - DNA, 22 bp, synthetic construct
  misc_feature 1..22: note = chemically synthesized
  source 1..22: mol_type = other DNA
tggactctggagaaagcccaga

SEQ ID NO: 60999 - DNA, 22 bp, synthetic construct
  misc_feature 1..22: note = chemically synthesized
  source 1..22: mol_type = other DNA
tggagaaagcccagaggtggtg

SEQ ID NO: 61000 - DNA, 22 bp, synthetic construct
  misc_feature 1..22: note = chemically synthesized
  source 1..22: mol_type = other DNA
gagaaagcccagaggtggtgcg

SEQ ID NO: 61001 - DNA, 22 bp, synthetic construct
  misc_feature 1..22: note = chemically synthesized
  source 1..22: mol_type = other DNA
acaccacaccctttgccagcct

SEQ ID NO: 61002 - DNA, 22 bp, synthetic construct
  misc_feature 1..22: note = chemically synthesized
  source 1..22: mol_type = other DNA
tgccagcctcctcaagaacctg

SEQ ID NO: 61003 - DNA, 22 bp, synthetic construct
  misc_feature 1..22: note = chemically synthesized
  source 1..22: mol_type = other DNA
gccagcctcctcaagaacctgg

SEQ ID NO: 61004 - DNA, 22 bp, synthetic construct
  misc_feature 1..22: note = chemically synthesized
  source 1..22: mol_type = other DNA
ccagcctcctcaagaacctggg

SEQ ID NO: 61005 - DNA, 22 bp, synthetic construct
  misc_feature 1..22: note = chemically synthesized
  source 1..22: mol_type = other DNA
ctcaagaacctgggcacgctct

SEQ ID NO: 61006 - DNA, 22 bp, synthetic construct
  misc_feature 1..22: note = chemically synthesized
  source 1..22: mol_type = other DNA
aagaacctgggcacgctctttg

SEQ ID NO: 61007 - DNA, 22 bp, synthetic construct
  misc_feature 1..22: note = chemically synthesized
  source 1..22: mol_type = other DNA
ggcacgctctttggcctggggc

SEQ ID NO: 61008 - DNA, 22 bp, synthetic construct
  misc_feature 1..22: note = chemically synthesized
  source 1..22: mol_type = other DNA
tttggcctggggctggctctca

SEQ ID NO: 61009 - DNA, 22 bp, synthetic construct
  misc_feature 1..22: note = chemically synthesized
  source 1..22: mol_type = other DNA
tggcctggggctggctctcaac

SEQ ID NO: 61010 - DNA, 22 bp, synthetic construct
  misc_feature 1..22: note = chemically synthesized
  source 1..22: mol_type = other DNA
ggcctggggctggctctcaact

SEQ ID NO: 61011 - DNA, 22 bp, synthetic construct
  misc_feature 1..22: note = chemically synthesized
  source 1..22: mol_type = other DNA
gcctggggctggctctcaactc

SEQ ID NO: 61012 - DNA, 22 bp, synthetic construct
  misc_feature 1..22: note = chemically synthesized
  source 1..22: mol_type = other DNA
gggctggctctcaactccagca

SEQ ID NO: 61013 - DNA, 22 bp, synthetic construct
  misc_feature 1..22: note = chemically synthesized
  source 1..22: mol_type = other DNA
gctctcaactccagcatgtaca

SEQ ID NO: 61014 - DNA, 22 bp, synthetic construct
  misc_feature 1..22: note = chemically synthesized
  source 1..22: mol_type = other DNA
tcaactccagcatgtacaggga

SEQ ID NO: 61015 - DNA, 22 bp, synthetic construct
  misc_feature 1..22: note = chemically synthesized
  source 1..22: mol_type = other DNA
aactccagcatgtacagggaga

SEQ ID NO: 61016 - DNA, 22 bp, synthetic construct
  misc_feature 1..22: note = chemically synthesized
  source 1..22: mol_type = other DNA
cagcatgtacagggagagctgc

SEQ ID NO: 61017 - DNA, 22 bp, synthetic construct
  misc_feature 1..22: note = chemically synthesized
  source 1..22: mol_type = other DNA
caaggggaaactcagcaagtgg

SEQ ID NO: 61018 - DNA, 22 bp, synthetic construct
  misc_feature 1..22: note = chemically synthesized
  source 1..22: mol_type = other DNA
agcaagtggctcccattccgcc

SEQ ID NO: 61019 - DNA, 22 bp, synthetic construct
  misc_feature 1..22: note = chemically synthesized
  source 1..22: mol_type = other DNA
ccattccgcctcagctctattg

SEQ ID NO: 61020 - DNA, 22 bp, synthetic construct
  misc_feature 1..22: note = chemically synthesized
  source 1..22: mol_type = other DNA
cgcctcagctctattgtagcct

SEQ ID NO: 61021 - DNA, 22 bp, synthetic construct
  misc_feature 1..22: note = chemically synthesized
  source 1..22: mol_type = other DNA
agctctattgtagcctccctcg

SEQ ID NO: 61022 - DNA, 22 bp, synthetic construct
  misc_feature 1..22: note = chemically synthesized
  source 1..22: mol_type = other DNA
tattgtagcctccctcgtcctc

SEQ ID NO: 61023 - DNA, 22 bp, synthetic construct
  misc_feature 1..22: note = chemically synthesized
  source 1..22: mol_type = other DNA
ttgtagcctccctcgtcctcct

SEQ ID NO: 61024 - DNA, 22 bp, synthetic construct
  misc_feature 1..22: note = chemically synthesized
  source 1..22: mol_type = other DNA
tagcctccctcgtcctcctgca

SEQ ID NO: 61025 - DNA, 22 bp, synthetic construct
  misc_feature 1..22: note = chemically synthesized
  source 1..22: mol_type = other DNA
cctcgtcctcctgcacgtcttt

SEQ ID NO: 61026 - DNA, 22 bp, synthetic construct
  misc_feature 1..22: note = chemically synthesized
  source 1..22: mol_type = other DNA
gtcctcctgcacgtctttgact

SEQ ID NO: 61027 - DNA, 22 bp, synthetic construct
  misc_feature 1..22: note = chemically synthesized
  source 1..22: mol_type = other DNA
ctgcacgtctttgactccttga

SEQ ID NO: 61028 - DNA, 22 bp, synthetic construct
  misc_feature 1..22: note = chemically synthesized
  source 1..22: mol_type = other DNA
cacgtctttgactccttgaaac

SEQ ID NO: 61029 - DNA, 22 bp, synthetic construct
  misc_feature 1..22: note = chemically synthesized
  source 1..22: mol_type = other DNA
tgactccttgaaacccccatcc

SEQ ID NO: 61030 - DNA, 22 bp, synthetic construct
  misc_feature 1..22: note = chemically synthesized
  source 1..22: mol_type = other DNA
gactccttgaaacccccatccc

SEQ ID NO: 61031 - DNA, 22 bp, synthetic construct
  misc_feature 1..22: note = chemically synthesized
  source 1..22: mol_type = other DNA
actccttgaaacccccatccca

SEQ ID NO: 61032 - DNA, 22 bp, synthetic construct
  misc_feature 1..22: note = chemically synthesized
  source 1..22: mol_type = other DNA
cttgaaacccccatcccaagtc

SEQ ID NO: 61033 - DNA, 22 bp, synthetic construct
  misc_feature 1..22: note = chemically synthesized
  source 1..22: mol_type = other DNA
gaaacccccatcccaagtcgag

SEQ ID NO: 61034 - DNA, 22 bp, synthetic construct
  misc_feature 1..22: note = chemically synthesized
  source 1..22: mol_type = other DNA
aaacccccatcccaagtcgagc

SEQ ID NO: 61035 - DNA, 22 bp, synthetic construct
  misc_feature 1..22: note = chemically synthesized
  source 1..22: mol_type = other DNA
gtcttctacgtcttgtccttct

SEQ ID NO: 61036 - DNA, 22 bp, synthetic construct
  misc_feature 1..22: note = chemically synthesized
  source 1..22: mol_type = other DNA
ctacgtcttgtccttctgcaag

SEQ ID NO: 61037 - DNA, 22 bp, synthetic construct
  misc_feature 1..22: note = chemically synthesized
  source 1..22: mol_type = other DNA
tacgtcttgtccttctgcaaga

SEQ ID NO: 61038 - DNA, 22 bp, synthetic construct
  misc_feature 1..22: note = chemically synthesized
  source 1..22: mol_type = other DNA
cgtcttgtccttctgcaagagt

SEQ ID NO: 61039 - DNA, 22 bp, synthetic construct
  misc_feature 1..22: note = chemically synthesized
  source 1..22: mol_type = other DNA
gtccttctgcaagagtgcggta

SEQ ID NO: 61040 - DNA, 22 bp, synthetic construct
  misc_feature 1..22: note = chemically synthesized
  source 1..22: mol_type = other DNA
tccttctgcaagagtgcggtag

SEQ ID NO: 61041 - DNA, 22 bp, synthetic construct
  misc_feature 1..22: note = chemically synthesized
  source 1..22: mol_type = other DNA
ctgcaagagtgcggtagtgccc

SEQ ID NO: 61042 - DNA, 22 bp, synthetic construct
  misc_feature 1..22: note = chemically synthesized
  source 1..22: mol_type = other DNA
tgcaagagtgcggtagtgcccc

SEQ ID NO: 61043 - DNA, 22 bp, synthetic construct
  misc_feature 1..22: note = chemically synthesized
  source 1..22: mol_type = other DNA
caagagtgcggtagtgcccctg

SEQ ID NO: 61044 - DNA, 22 bp, synthetic construct
  misc_feature 1..22: note = chemically synthesized
  source 1..22: mol_type = other DNA
gcatccgtcagtgtcatcccct

SEQ ID NO: 61045 - DNA, 22 bp, synthetic construct
  misc_feature 1..22: note = chemically synthesized
  source 1..22: mol_type = other DNA
ctgcctcgcccaggtcctgggc

SEQ ID NO: 61046 - DNA, 22 bp, synthetic construct
  misc_feature 1..22: note = chemically synthesized
  source 1..22: mol_type = other DNA
cctcgcccaggtcctgggccag

SEQ ID NO: 61047 - DNA, 22 bp, synthetic construct
  misc_feature 1..22: note = chemically synthesized
  source 1..22: mol_type = other DNA
gcccaggtcctgggccagccgc

SEQ ID NO: 61048 - DNA, 22 bp, synthetic construct
  misc_feature 1..22: note = chemically synthesized
  source 1..22: mol_type = other DNA
ggccagccgcacaagaagtcgt

SEQ ID NO: 61049 - DNA, 22 bp, synthetic construct
  misc_feature 1..22: note = chemically synthesized
  source 1..22: mol_type = other DNA
taagagatgtggagtcttcggt

SEQ ID NO: 61050 - DNA, 22 bp, synthetic construct
  misc_feature 1..22: note = chemically synthesized
  source 1..22: mol_type = other DNA
cggtgtttaaagtcaacaacca

SEQ ID NO: 61051 - DNA, 22 bp, synthetic construct
  misc_feature 1..22: note = chemically synthesized
  source 1..22: mol_type = other DNA
ggtgtttaaagtcaacaaccat

SEQ ID NO: 61052 - DNA, 22 bp, synthetic construct
  misc_feature 1..22: note = chemically synthesized
  source 1..22: mol_type = other DNA
aaagtcaacaaccatgccaggg

SEQ ID NO: 61053 - DNA, 22 bp, synthetic construct
  misc_feature 1..22: note = chemically synthesized
  source 1..22: mol_type = other DNA
aagtcaacaaccatgccaggga

SEQ ID NO: 61054 - DNA, 22 bp, synthetic construct
  misc_feature 1..22: note = chemically synthesized
  source 1..22: mol_type = other DNA
aggaggactactatttgaagca

SEQ ID NO: 61055 - DNA, 22 bp, synthetic construct
  misc_feature 1..22: note = chemically synthesized
  source 1..22: mol_type = other DNA
ctatttgaagcaatgggcactg

SEQ ID NO: 61056 - DNA, 22 bp, synthetic construct
  misc_feature 1..22: note = chemically synthesized
  source 1..22: mol_type = other DNA
tttgaagcaatgggcactggta

SEQ ID NO: 61057 - DNA, 22 bp, synthetic construct
  misc_feature 1..22: note = chemically synthesized
  source 1..22: mol_type = other DNA
gaagcaatgggcactggtattt

SEQ ID NO: 61058 - DNA, 22 bp, synthetic construct
  misc_feature 1..22: note = chemically synthesized
  source 1..22: mol_type = other DNA
aagcaatgggcactggtatttg

SEQ ID NO: 61059 - DNA, 22 bp, synthetic construct
  misc_feature 1..22: note = chemically synthesized
  source 1..22: mol_type = other DNA
gtatttggagcaagtgacatgc

SEQ ID NO: 61060 - DNA, 22 bp, synthetic construct
  misc_feature 1..22: note = chemically synthesized
  source 1..22: mol_type = other DNA
ggagcaagtgacatgccatcca

SEQ ID NO: 61061 - DNA, 22 bp, synthetic construct
  misc_feature 1..22: note = chemically synthesized
  source 1..22: mol_type = other DNA
gagcaagtgacatgccatccat

SEQ ID NO: 61062 - DNA, 22 bp, synthetic construct
  misc_feature 1..22: note = chemically synthesized
  source 1..22: mol_type = other DNA
tgccgtcgtggaattaaatcac

SEQ ID NO: 61063 - DNA, 22 bp, synthetic construct
  misc_feature 1..22: note = chemically synthesized
  source 1..22: mol_type = other DNA
ccgtcgtggaattaaatcacgg

SEQ ID NO: 61064 - DNA, 22 bp, synthetic construct
  misc_feature 1..22: note = chemically synthesized
  source 1..22: mol_type = other DNA
aatcacggatggcagattggag

SEQ ID NO: 61065 - DNA, 22 bp, synthetic construct
  misc_feature 1..22: note = chemically synthesized
  source 1..22: mol_type = other DNA
gagggtcgcctggcttattccc

SEQ ID NO: 61066 - DNA, 22 bp, synthetic construct
  misc_feature 1..22: note = chemically synthesized
  source 1..22: mol_type = other DNA
gcttattcccatgtgtgactcc

SEQ ID NO: 61067 - DNA, 22 bp, synthetic construct
  misc_feature 1..22: note = chemically synthesized
  source 1..22: mol_type = other DNA
attcccatgtgtgactccagcc

SEQ ID NO: 61068 - DNA, 22 bp, synthetic construct
  misc_feature 1..22: note = chemically synthesized
  source 1..22: mol_type = other DNA
ttcccatgtgtgactccagcct

SEQ ID NO: 61069 - DNA, 22 bp, synthetic construct
  misc_feature 1..22: note = chemically synthesized
  source 1..22: mol_type = other DNA
ccatgtgtgactccagcctgcc

SEQ ID NO: 61070 - DNA, 22 bp, synthetic construct
  misc_feature 1..22: note = chemically synthesized
  source 1..22: mol_type = other DNA
cagcctgccctcagcacagact

SEQ ID NO: 61071 - DNA, 22 bp, synthetic construct
  misc_feature 1..22: note = chemically synthesized
  source 1..22: mol_type = other DNA
ccctcagcacagactctttcag

SEQ ID NO: 61072 - DNA, 22 bp, synthetic construct
  misc_feature 1..22: note = chemically synthesized
  source 1..22: mol_type = other DNA
agcacagactctttcagatgga

SEQ ID NO: 61073 - DNA, 22 bp, synthetic construct
  misc_feature 1..22: note = chemically synthesized
  source 1..22: mol_type = other DNA
tttcagatggaggtgccatatc

SEQ ID NO: 61074 - DNA, 22 bp, synthetic construct
  misc_feature 1..22: note = chemically synthesized
  source 1..22: mol_type = other DNA
tcagatggaggtgccatatcac

SEQ ID NO: 61075 - DNA, 22 bp, synthetic construct
  misc_feature 1..22: note = chemically synthesized
  source 1..22: mol_type = other DNA
cagatggaggtgccatatcacg

SEQ ID NO: 61076 - DNA, 22 bp, synthetic construct
  misc_feature 1..22: note = chemically synthesized
  source 1..22: mol_type = other DNA
agatggaggtgccatatcacgt

SEQ ID NO: 61077 - DNA, 22 bp, synthetic construct
  misc_feature 1..22: note = chemically synthesized
  source 1..22: mol_type = other DNA
cccgccaggaggtcctcctctc

SEQ ID NO: 61078 - DNA, 22 bp, synthetic construct
  misc_feature 1..22: note = chemically synthesized
  source 1..22: mol_type = other DNA
ccgccaggaggtcctcctctct

SEQ ID NO: 61079 - DNA, 22 bp, synthetic construct
  misc_feature 1..22: note = chemically synthesized
  source 1..22: mol_type = other DNA
ctctctctacttgaatactctc

SEQ ID NO: 61080 - DNA, 22 bp, synthetic construct
  misc_feature 1..22: note = chemically synthesized
  source 1..22: mol_type = other DNA
tctctacttgaatactctcaca

SEQ ID NO: 61081 - DNA, 22 bp, synthetic construct
  misc_feature 1..22: note = chemically synthesized
  source 1..22: mol_type = other DNA
tctacttgaatactctcacaag

SEQ ID NO: 61082 - DNA, 22 bp, synthetic construct
  misc_feature 1..22: note = chemically synthesized
  source 1..22: mol_type = other DNA
tacttgaatactctcacaagta

SEQ ID NO: 61083 - DNA, 22 bp, synthetic construct
  misc_feature 1..22: note = chemically synthesized
  source 1..22: mol_type = other DNA
cttgaatactctcacaagtagg

SEQ ID NO: 61084 - DNA, 22 bp, synthetic construct
  misc_feature 1..22: note = chemically synthesized
  source 1..22: mol_type = other DNA
gaatactctcacaagtagggag

SEQ ID NO: 61085 - DNA, 22 bp, synthetic construct
  misc_feature 1..22: note = chemically synthesized
  source 1..22: mol_type = other DNA
aatactctcacaagtagggagc

SEQ ID NO: 61086 - DNA, 22 bp, synthetic construct
  misc_feature 1..22: note = chemically synthesized
  source 1..22: mol_type = other DNA
tcacaagtagggagctcactcc

SEQ ID NO: 61087 - DNA, 22 bp, synthetic construct
  misc_feature 1..22: note = chemically synthesized
  source 1..22: mol_type = other DNA
acaagtagggagctcactccca

SEQ ID NO: 61088 - DNA, 22 bp, synthetic construct
  misc_feature 1..22: note = chemically synthesized
  source 1..22: mol_type = other DNA
actcccactggaacagcccatt

SEQ ID NO: 61089 - DNA, 22 bp, synthetic construct
  misc_feature 1..22: note = chemically synthesized
  source 1..22: mol_type = other DNA
ccactggaacagcccattttat

SEQ ID NO: 61090 - DNA, 22 bp, synthetic construct
  misc_feature 1..22: note = chemically synthesized
  source 1..22: mol_type = other DNA
gaacagcccattttatctttga

SEQ ID NO: 61091 - DNA, 22 bp, synthetic construct
  misc_feature 1..22: note = chemically synthesized
  source 1..22: mol_type = other DNA
tatctttgaatggtcttctgcc

SEQ ID NO: 61092 - DNA, 22 bp, synthetic construct
  misc_feature 1..22: note = chemically synthesized
  source 1..22: mol_type = other DNA
atctttgaatggtcttctgcca

SEQ ID NO: 61093 - DNA, 22 bp, synthetic construct
  misc_feature 1..22: note = chemically synthesized
  source 1..22: mol_type = other DNA
tctttgaatggtcttctgccag

SEQ ID NO: 61094 - DNA, 22 bp, synthetic construct
  misc_feature 1..22: note = chemically synthesized
  source 1..22: mol_type = other DNA
tgaatggtcttctgccagccca

SEQ ID NO: 61095 - DNA, 22 bp, synthetic construct
  misc_feature 1..22: note = chemically synthesized
  source 1..22: mol_type = other DNA
gaatggtcttctgccagcccat

SEQ ID NO: 61096 - DNA, 22 bp, synthetic construct
  misc_feature 1..22: note = chemically synthesized
  source 1..22: mol_type = other DNA
aatggtcttctgccagcccatt

SEQ ID NO: 61097 - DNA, 22 bp, synthetic construct
  misc_feature 1..22: note = chemically synthesized
  source 1..22: mol_type = other DNA
ctgccagcccattttgaggcca

SEQ ID NO: 61098 - DNA, 22 bp, synthetic construct
  misc_feature 1..22: note = chemically synthesized
  source 1..22: mol_type = other DNA
tgccagcccattttgaggccag

SEQ ID NO: 61099 - DNA, 22 bp, synthetic construct
  misc_feature 1..22: note = chemically synthesized
  source 1..22: mol_type = other DNA
ccagcccattttgaggccagag

SEQ ID NO: 61100 - DNA, 22 bp, synthetic construct
  misc_feature 1..22: note = chemically synthesized
  source 1..22: mol_type = other DNA
tgaggccagaggtgctgtcagc

SEQ ID NO: 61101 - DNA, 22 bp, synthetic construct
  misc_feature 1..22: note = chemically synthesized
  source 1..22: mol_type = other DNA
gaggccagaggtgctgtcagct

SEQ ID NO: 61102 - DNA, 22 bp, synthetic construct
  misc_feature 1..22: note = chemically synthesized
  source 1..22: mol_type = other DNA
aggccagaggtgctgtcagctc

SEQ ID NO: 61103 - DNA, 22 bp, synthetic construct
  misc_feature 1..22: note = chemically synthesized
  source 1..22: mol_type = other DNA
tcagctcaggtggtcctctttt

SEQ ID NO: 61104 - DNA, 22 bp, synthetic construct
  misc_feature 1..22: note = chemically synthesized
  source 1..22: mol_type = other DNA
aggtggtcctcttttacaatcc

SEQ ID NO: 61105 - DNA, 22 bp, synthetic construct
  misc_feature 1..22: note = chemically synthesized
  source 1..22: mol_type = other DNA
ttttacaatcctaatcatattg

SEQ ID NO: 61106 - DNA, 22 bp, synthetic construct
  misc_feature 1..22: note = chemically synthesized
  source 1..22: mol_type = other DNA
ttacaatcctaatcatattggg

SEQ ID NO: 61107 - DNA, 22 bp, synthetic construct
  misc_feature 1..22: note = chemically synthesized
  source 1..22: mol_type = other DNA
tacaatcctaatcatattgggt

SEQ ID NO: 61108 - DNA, 22 bp, synthetic construct
  misc_feature 1..22: note = chemically synthesized
  source 1..22: mol_type = other DNA
acaatcctaatcatattgggta

SEQ ID NO: 61109 - DNA, 22 bp, synthetic construct
  misc_feature 1..22: note = chemically synthesized
  source 1..22: mol_type = other DNA
caatcctaatcatattgggtaa

SEQ ID NO: 61110 - DNA, 22 bp, synthetic construct
  misc_feature 1..22: note = chemically synthesized
  source 1..22: mol_type = other DNA
atcatattgggtaatgtttttg

SEQ ID NO: 61111 - DNA, 22 bp, synthetic construct
  misc_feature 1..22: note = chemically synthesized
  source 1..22: mol_type = other DNA
ggtaatgtttttgaaaagctaa

SEQ ID NO: 61112 - DNA, 22 bp, synthetic construct
  misc_feature 1..22: note = chemically synthesized
  source 1..22: mol_type = other DNA
ttgaaaagctaatgaagctatt

SEQ ID NO: 61113 - DNA, 22 bp, synthetic construct
  misc_feature 1..22: note = chemically synthesized
  source 1..22: mol_type = other DNA
tgaaaagctaatgaagctattg

SEQ ID NO: 61114 - DNA, 22 bp, synthetic construct
  misc_feature 1..22: note = chemically synthesized
  source 1..22: mol_type = other DNA
gaaaagctaatgaagctattga

SEQ ID NO: 61115 - DNA, 22 bp, synthetic construct
  misc_feature 1..22: note = chemically synthesized
  source 1..22: mol_type = other DNA
aaaagctaatgaagctattgag

SEQ ID NO: 61116 - DNA, 22 bp, synthetic construct
  misc_feature 1..22: note = chemically synthesized
  source 1..22: mol_type = other DNA
atgaagctattgagaaagacct

SEQ ID NO: 61117 - DNA, 22 bp, synthetic construct
  misc_feature 1..22: note = chemically synthesized
  source 1..22: mol_type = other DNA
ttgagaaagacctgttgctaga

SEQ ID NO: 61118 - DNA, 22 bp, synthetic construct
  misc_feature 1..22: note = chemically synthesized
  source 1..22: mol_type = other DNA
agaaagacctgttgctagaagt

SEQ ID NO: 61119 - DNA, 22 bp, synthetic construct
  misc_feature 1..22: note = chemically synthesized
  source 1..22: mol_type = other DNA
ttgctagaagttgggttgttct

SEQ ID NO: 61120 - DNA, 22 bp, synthetic construct
  misc_feature 1..22: note = chemically synthesized
  source 1..22: mol_type = other DNA
ctagaagttgggttgttctgga

SEQ ID NO: 61121 - DNA, 22 bp, synthetic construct
  misc_feature 1..22: note = chemically synthesized
  source 1..22: mol_type = other DNA
gaagttgggttgttctggattt

SEQ ID NO: 61122 - DNA, 22 bp, synthetic construct
  misc_feature 1..22: note = chemically synthesized
  source 1..22: mol_type = other DNA
ggttgttctggattttcccctg

SEQ ID NO: 61123 - DNA, 22 bp, synthetic construct
  misc_feature 1..22: note = chemically synthesized
  source 1..22: mol_type = other DNA
ttctggattttcccctgaagac

SEQ ID NO: 61124 - DNA, 22 bp, synthetic construct
  misc_feature 1..22: note = chemically synthesized
  source 1..22: mol_type = other DNA
tggattttcccctgaagactta

SEQ ID NO: 61125 - DNA, 22 bp, synthetic construct
  misc_feature 1..22: note = chemically synthesized
  source 1..22: mol_type = other DNA
gattttcccctgaagacttact

SEQ ID NO: 61126 - DNA, 22 bp, synthetic construct
  misc_feature 1..22: note = chemically synthesized
  source 1..22: mol_type = other DNA
tcccctgaagacttacttattc

SEQ ID NO: 61127 - DNA, 22 bp, synthetic construct
  misc_feature 1..22: note = chemically synthesized
  source 1..22: mol_type = other DNA
cccctgaagacttacttattct

SEQ ID NO: 61128 - DNA, 22 bp, synthetic construct
  misc_feature 1..22: note = chemically synthesized
  source 1..22: mol_type = other DNA
ccctgaagacttacttattctt

SEQ ID NO: 61129 - DNA, 22 bp, synthetic construct
  misc_feature 1..22: note = chemically synthesized
  source 1..22: mol_type = other DNA
aagacttacttattcttccgtc

SEQ ID NO: 61130 - DNA, 22 bp, synthetic construct
  misc_feature 1..22: note = chemically synthesized
  source 1..22: mol_type = other DNA
acttattcttccgtcacatata

SEQ ID NO: 61131 - DNA, 22 bp, synthetic construct
  misc_feature 1..22: note = chemically synthesized
  source 1..22: mol_type = other DNA
cttattcttccgtcacatatac

SEQ ID NO: 61132 - DNA, 22 bp, synthetic construct
  misc_feature 1..22: note = chemically synthesized
  source 1..22: mol_type = other DNA
attcttccgtcacatatacaaa

SEQ ID NO: 61133 - DNA, 22 bp, synthetic construct
  misc_feature 1..22: note = chemically synthesized
  source 1..22: mol_type = other DNA
ttcttccgtcacatatacaaaa

SEQ ID NO: 61134 - DNA, 22 bp, synthetic construct
  misc_feature 1..22: note = chemically synthesized
  source 1..22: mol_type = other DNA
ttccgtcacatatacaaaagca

SEQ ID NO: 61135 - DNA, 22 bp, synthetic construct
  misc_feature 1..22: note = chemically synthesized
  source 1..22: mol_type = other DNA
ccgtcacatatacaaaagcaag

SEQ ID NO: 61136 - DNA, 22 bp, synthetic construct
  misc_feature 1..22: note = chemically synthesized
  source 1..22: mol_type = other DNA
cgtcacatatacaaaagcaaga

SEQ ID NO: 61137 - DNA, 22 bp, synthetic construct
  misc_feature 1..22: note = chemically synthesized
  source 1..22: mol_type = other DNA
ccaggtagggccagctcacaag

SEQ ID NO: 61138 - DNA, 22 bp, synthetic construct
  misc_feature 1..22: note = chemically synthesized
  source 1..22: mol_type = other DNA
caggtagggccagctcacaagc

SEQ ID NO: 61139 - DNA, 22 bp, synthetic construct
  misc_feature 1..22: note = chemically synthesized
  source 1..22: mol_type = other DNA
acaagcccaggctggagatcct

SEQ ID NO: 61140 - DNA, 22 bp, synthetic construct
  misc_feature 1..22: note = chemically synthesized
  source 1..22: mol_type = other DNA
gagatcctaactgagaattttc

SEQ ID NO: 61141 - DNA, 22 bp, synthetic construct
  misc_feature 1..22: note = chemically synthesized
  source 1..22: mol_type = other DNA
actgagaattttctacctgtgt

SEQ ID NO: 61142 - DNA, 22 bp, synthetic construct
  misc_feature 1..22: note = chemically synthesized
  source 1..22: mol_type = other DNA
agaattttctacctgtgttcat

SEQ ID NO: 61143 - DNA, 22 bp, synthetic construct
  misc_feature 1..22: note = chemically synthesized
  source 1..22: mol_type = other DNA
tctacctgtgttcattcttacc

SEQ ID NO: 61144 - DNA, 22 bp, synthetic construct
  misc_feature 1..22: note = chemically synthesized
  source 1..22: mol_type = other DNA
ctacctgtgttcattcttaccg

SEQ ID NO: 61145 - DNA, 22 bp, synthetic construct
  misc_feature 1..22: note = chemically synthesized
  source 1..22: mol_type = other DNA
tacctgtgttcattcttaccga

SEQ ID NO: 61146 - DNA, 22 bp, synthetic construct
  misc_feature 1..22: note = chemically synthesized
  source 1..22: mol_type = other DNA
cctgtgttcattcttaccgaga

SEQ ID NO: 61147 - DNA, 22 bp, synthetic construct
  misc_feature 1..22: note = chemically synthesized
  source 1..22: mol_type = other DNA
tgttcattcttaccgagaaaag

SEQ ID NO: 61148 - DNA, 22 bp, synthetic construct
  misc_feature 1..22: note = chemically synthesized
  source 1..22: mol_type = other DNA
attcttaccgagaaaaggagaa

SEQ ID NO: 61149 - DNA, 22 bp, synthetic construct
  misc_feature 1..22: note = chemically synthesized
  source 1..22: mol_type = other DNA
ttaccgagaaaaggagaaagga

SEQ ID NO: 61150 - DNA, 22 bp, synthetic construct
  misc_feature 1..22: note = chemically synthesized
  source 1..22: mol_type = other DNA
accgagaaaaggagaaaggagc

SEQ ID NO: 61151 - DNA, 22 bp, synthetic construct
  misc_feature 1..22: note = chemically synthesized
  source 1..22: mol_type = other DNA
ccgagaaaaggagaaaggagct

SEQ ID NO: 61152 - DNA, 22 bp, synthetic construct
  misc_feature 1..22: note = chemically synthesized
  source 1..22: mol_type = other DNA
tgaatctgataggaaaagaagg

SEQ ID NO: 61153 - DNA, 22 bp, synthetic construct
  misc_feature 1..22: note = chemically synthesized
  source 1..22: mol_type = other DNA
aatctgataggaaaagaaggct

SEQ ID NO: 61154 - DNA, 22 bp, synthetic construct
  misc_feature 1..22: note = chemically synthesized
  source 1..22: mol_type = other DNA
ataggaaaagaaggctgcctaa

SEQ ID NO: 61155 - DNA, 22 bp, synthetic construct
  misc_feature 1..22: note = chemically synthesized
  source 1..22: mol_type = other DNA
cctaaggaggagtttttagtat

SEQ ID NO: 61156 - DNA, 22 bp, synthetic construct
  misc_feature 1..22: note = chemically synthesized
  source 1..22: mol_type = other DNA
aggaggagtttttagtatgtgg

SEQ ID NO: 61157 - DNA, 22 bp, synthetic construct
  misc_feature 1..22: note = chemically synthesized
  source 1..22: mol_type = other DNA
ttagtatgtggcgtatcatgca

SEQ ID NO: 61158 - DNA, 22 bp, synthetic construct
  misc_feature 1..22: note = chemically synthesized
  source 1..22: mol_type = other DNA
tagtatgtggcgtatcatgcaa

SEQ ID NO: 61159 - DNA, 22 bp, synthetic construct
  misc_feature 1..22: note = chemically synthesized
  source 1..22: mol_type = other DNA
agtatgtggcgtatcatgcaag

SEQ ID NO: 61160 - DNA, 22 bp, synthetic construct
  misc_feature 1..22: note = chemically synthesized
  source 1..22: mol_type = other DNA
gtatgtggcgtatcatgcaagt

SEQ ID NO: 61161 - DNA, 22 bp, synthetic construct
  misc_feature 1..22: note = chemically synthesized
  source 1..22: mol_type = other DNA
tgccaagccatgtctaaatggc

SEQ ID NO: 61162 - DNA, 22 bp, synthetic construct
  misc_feature 1..22: note = chemically synthesized
  source 1..22: mol_type = other DNA
aatggctttaattatatagtaa

SEQ ID NO: 61163 - DNA, 22 bp, synthetic construct
  misc_feature 1..22: note = chemically synthesized
  source 1..22: mol_type = other DNA
taattatatagtaatgcactct

SEQ ID NO: 61164 - DNA, 22 bp, synthetic construct
  misc_feature 1..22: note = chemically synthesized
  source 1..22: mol_type = other DNA
aattatatagtaatgcactctc

SEQ ID NO: 61165 - DNA, 22 bp, synthetic construct
  misc_feature 1..22: note = chemically synthesized
  source 1..22: mol_type = other DNA
attatatagtaatgcactctca

SEQ ID NO: 61166 - DNA, 22 bp, synthetic construct
  misc_feature 1..22: note = chemically synthesized
  source 1..22: mol_type = other DNA
tatagtaatgcactctcagtaa

SEQ ID NO: 61167 - DNA, 22 bp, synthetic construct
  misc_feature 1..22: note = chemically synthesized
  source 1..22: mol_type = other DNA
tcagtaatgggggaccagctta

SEQ ID NO: 61168 - DNA, 22 bp, synthetic construct
  misc_feature 1..22: note = chemically synthesized
  source 1..22: mol_type = other DNA
agtaatgggggaccagcttaag

SEQ ID NO: 61169 - DNA, 22 bp, synthetic construct
  misc_feature 1..22: note = chemically synthesized
  source 1..22: mol_type = other DNA
aagtataattaatagatggtta

SEQ ID NO: 61170 - DNA, 22 bp, synthetic construct
  misc_feature 1..22: note = chemically synthesized
  source 1..22: mol_type = other DNA
agtataattaatagatggttag

SEQ ID NO: 61171 - DNA, 22 bp, synthetic construct
  misc_feature 1..22: note = chemically synthesized
  source 1..22: mol_type = other DNA
atagatggttagtggggtaatt

SEQ ID NO: 61172 - DNA, 22 bp, synthetic construct
  misc_feature 1..22: note = chemically synthesized
  source 1..22: mol_type = other DNA
gtggggtaattctgcttctagt

SEQ ID NO: 61173 - DNA, 22 bp, synthetic construct
  misc_feature 1..22: note = chemically synthesized
  source 1..22: mol_type = other DNA
tgcttctagtattttttttact

SEQ ID NO: 61174 - DNA, 22 bp, synthetic construct
  misc_feature 1..22: note = chemically synthesized
  source 1..22: mol_type = other DNA
cttctagtattttttttactgt

SEQ ID NO: 61175 - DNA, 22 bp, synthetic construct
  misc_feature 1..22: note = chemically synthesized
  source 1..22: mol_type = other DNA
ctagtattttttttactgtgca

SEQ ID NO: 61176 - DNA, 22 bp, synthetic construct
  misc_feature 1..22: note = chemically synthesized
  source 1..22: mol_type = other DNA
tagtattttttttactgtgcat

SEQ ID NO: 61177 - DNA, 22 bp, synthetic construct
  misc_feature 1..22: note = chemically synthesized
  source 1..22: mol_type = other DNA
gtattttttttactgtgcatac

SEQ ID NO: 61178 - DNA, 22 bp, synthetic construct
  misc_feature 1..22: note = chemically synthesized
  source 1..22: mol_type = other DNA
tttttactgtgcatacatgttc

SEQ ID NO: 61179 - DNA, 22 bp, synthetic construct
  misc_feature 1..22: note = chemically synthesized
  source 1..22: mol_type = other DNA
ttttactgtgcatacatgttca

SEQ ID NO: 61180 - DNA, 22 bp, synthetic construct
  misc_feature 1..22: note = chemically synthesized
  source 1..22: mol_type = other DNA
tttactgtgcatacatgttcat

SEQ ID NO: 61181 - DNA, 22 bp, synthetic construct
  misc_feature 1..22: note = chemically synthesized
  source 1..22: mol_type = other DNA
ttactgtgcatacatgttcatc

SEQ ID NO: 61182 - DNA, 22 bp, synthetic construct
  misc_feature 1..22: note = chemically synthesized
  source 1..22: mol_type = other DNA
tactgtgcatacatgttcatcg

SEQ ID NO: 61183 - DNA, 22 bp, synthetic construct
  misc_feature 1..22: note = chemically synthesized
  source 1..22: mol_type = other DNA
actgtgcatacatgttcatcgt

SEQ ID NO: 61184 - DNA, 22 bp, synthetic construct
  misc_feature 1..22: note = chemically synthesized
  source 1..22: mol_type = other DNA
ctgtgcatacatgttcatcgta

SEQ ID NO: 61185 - DNA, 22 bp, synthetic construct
  misc_feature 1..22: note = chemically synthesized
  source 1..22: mol_type = other DNA
tgcatacatgttcatcgtattt

SEQ ID NO: 61186 - DNA, 22 bp, synthetic construct
  misc_feature 1..22: note = chemically synthesized
  source 1..22: mol_type = other DNA
atcgtatttccttggatttctg

SEQ ID NO: 61187 - DNA, 22 bp, synthetic construct
  misc_feature 1..22: note = chemically synthesized
  source 1..22: mol_type = other DNA
ccttggatttctgaatggctgc

SEQ ID NO: 61188 - DNA, 22 bp, synthetic construct
  misc_feature 1..22: note = chemically synthesized
  source 1..22: mol_type = other DNA
cttggatttctgaatggctgca

SEQ ID NO: 61189 - DNA, 22 bp, synthetic construct
  misc_feature 1..22: note = chemically synthesized
  source 1..22: mol_type = other DNA
ggatttctgaatggctgcagtg

SEQ ID NO: 61190 - DNA, 22 bp, synthetic construct
  misc_feature 1..22: note = chemically synthesized
  source 1..22: mol_type = other DNA
gatttctgaatggctgcagtga

SEQ ID NO: 61191 - DNA, 22 bp, synthetic construct
  misc_feature 1..22: note = chemically synthesized
  source 1..22: mol_type = other DNA
ctgaatggctgcagtgacccag

SEQ ID NO: 61192 - DNA, 22 bp, synthetic construct
  misc_feature 1..22: note = chemically synthesized
  source 1..22: mol_type = other DNA
tgaatggctgcagtgacccaga

SEQ ID NO: 61193 - DNA, 22 bp, synthetic construct
  misc_feature 1..22: note = chemically synthesized
  source 1..22: mol_type = other DNA
aatggctgcagtgacccagata

SEQ ID NO: 61194 - DNA, 22 bp, synthetic construct
  misc_feature 1..22: note = chemically synthesized
  source 1..22: mol_type = other DNA
cagtgacccagatattgcacta

SEQ ID NO: 61195 - DNA, 22 bp, synthetic construct
  misc_feature 1..22: note = chemically synthesized
  source 1..22: mol_type = other DNA
cactaggtcaaaacattcaggt

SEQ ID NO: 61196 - DNA, 22 bp, synthetic construct
  misc_feature 1..22: note = chemically synthesized
  source 1..22: mol_type = other DNA
ggtcaaaacattcaggtatagc

SEQ ID NO: 61197 - DNA, 22 bp, synthetic construct
  misc_feature 1..22: note = chemically synthesized
  source 1..22: mol_type = other DNA
aggtatagctgacatctcctct

SEQ ID NO: 61198 - DNA, 22 bp, synthetic construct
  misc_feature 1..22: note = chemically synthesized
  source 1..22: mol_type = other DNA
acatctcctctatcacattaca

SEQ ID NO: 61199 - DNA, 22 bp, synthetic construct
  misc_feature 1..22: note = chemically synthesized
  source 1..22: mol_type = other DNA
ctctatcacattacatcatcct

SEQ ID NO: 61200 - DNA, 22 bp, synthetic construct
  misc_feature 1..22: note = chemically synthesized
  source 1..22: mol_type = other DNA
tatcacattacatcatcctcct

SEQ ID NO: 61201 - DNA, 22 bp, synthetic construct
  misc_feature 1..22: note = chemically synthesized
  source 1..22: mol_type = other DNA
tcacattacatcatcctcctta

SEQ ID NO: 61202 - DNA, 22 bp, synthetic construct
  misc_feature 1..22: note = chemically synthesized
  source 1..22: mol_type = other DNA
catcatcctccttataagccca

SEQ ID NO: 61203 - DNA, 22 bp, synthetic construct
  misc_feature 1..22: note = chemically synthesized
  source 1..22: mol_type = other DNA
cttataagcccagctctgcttt

SEQ ID NO: 61204 - DNA, 22 bp, synthetic construct
  misc_feature 1..22: note = chemically synthesized
  source 1..22: mol_type = other DNA
ataagcccagctctgctttttc

SEQ ID NO: 61205 - DNA, 22 bp, synthetic construct
  misc_feature 1..22: note = chemically synthesized
  source 1..22: mol_type = other DNA
taagcccagctctgctttttcc

SEQ ID NO: 61206 - DNA, 22 bp, synthetic construct
  misc_feature 1..22: note = chemically synthesized
  source 1..22: mol_type = other DNA
tgctttttccagattcttccac

SEQ ID NO: 61207 - DNA, 22 bp, synthetic construct
  misc_feature 1..22: note = chemically synthesized
  source 1..22: mol_type = other DNA
ctttttccagattcttccactg

SEQ ID NO: 61208 - DNA, 22 bp, synthetic construct
  misc_feature 1..22: note = chemically synthesized
  source 1..22: mol_type = other DNA
tttccagattcttccactggct

SEQ ID NO: 61209 - DNA, 22 bp, synthetic construct
  misc_feature 1..22: note = chemically synthesized
  source 1..22: mol_type = other DNA
ttccagattcttccactggctc

SEQ ID NO: 61210 - DNA, 22 bp, synthetic construct
  misc_feature 1..22: note = chemically synthesized
  source 1..22: mol_type = other DNA
tccagattcttccactggctcc

SEQ ID NO: 61211 - DNA, 22 bp, synthetic construct
  misc_feature 1..22: note = chemically synthesized
  source 1..22: mol_type = other DNA
ccagattcttccactggctcca

SEQ ID NO: 61212 - DNA, 22 bp, synthetic construct
  misc_feature 1..22: note = chemically synthesized
  source 1..22: mol_type = other DNA
cagattcttccactggctccac

SEQ ID NO: 61213 - DNA, 22 bp, synthetic construct
  misc_feature 1..22: note = chemically synthesized
  source 1..22: mol_type = other DNA
ttccactggctccacatccacc

SEQ ID NO: 61214 - DNA, 22 bp, synthetic construct
  misc_feature 1..22: note = chemically synthesized
  source 1..22: mol_type = other DNA
ccactggctccacatccacccc

SEQ ID NO: 61215 - DNA, 22 bp, synthetic construct
  misc_feature 1..22: note = chemically synthesized
  source 1..22: mol_type = other DNA
cactggctccacatccacccca

SEQ ID NO: 61216 - DNA, 22 bp, synthetic construct
  misc_feature 1..22: note = chemically synthesized
  source 1..22: mol_type = other DNA
gctccacatccaccccactgga

SEQ ID NO: 61217 - DNA, 22 bp, synthetic construct
  misc_feature 1..22: note = chemically synthesized
  source 1..22: mol_type = other DNA
cacatccaccccactggatctt

SEQ ID NO: 61218 - DNA, 22 bp, synthetic construct
  misc_feature 1..22: note = chemically synthesized
  source 1..22: mol_type = other DNA
gatcttcagaaggctagagggc

SEQ ID NO: 61219 - DNA, 22 bp, synthetic construct
  misc_feature 1..22: note = chemically synthesized
  source 1..22: mol_type = other DNA
cagaaggctagagggcgactct

SEQ ID NO: 61220 - DNA, 22 bp, synthetic construct
  misc_feature 1..22: note = chemically synthesized
  source 1..22: mol_type = other DNA
agaaggctagagggcgactctg

SEQ ID NO: 61221 - DNA, 22 bp, synthetic construct
  misc_feature 1..22: note = chemically synthesized
  source 1..22: mol_type = other DNA
gagggcgactctggtggtgctt

SEQ ID NO: 61222 - DNA, 22 bp, synthetic construct
  misc_feature 1..22: note = chemically synthesized
  source 1..22: mol_type = other DNA
tggtggtgcttttgtatgtttc

SEQ ID NO: 61223 - DNA, 22 bp, synthetic construct
  misc_feature 1..22: note = chemically synthesized
  source 1..22: mol_type = other DNA
gtggtgcttttgtatgtttcaa

SEQ ID NO: 61224 - DNA, 22 bp, synthetic construct
  misc_feature 1..22: note = chemically synthesized
  source 1..22: mol_type = other DNA
ttgtatgtttcaattaggctct

SEQ ID NO: 61225 - DNA, 22 bp, synthetic construct
  misc_feature 1..22: note = chemically synthesized
  source 1..22: mol_type = other DNA
tgtatgtttcaattaggctctg

SEQ ID NO: 61226 - DNA, 22 bp, synthetic construct
  misc_feature 1..22: note = chemically synthesized
  source 1..22: mol_type = other DNA
gtatgtttcaattaggctctga

SEQ ID NO: 61227 - DNA, 22 bp, synthetic construct
  misc_feature 1..22: note = chemically synthesized
  source 1..22: mol_type = other DNA
tatgtttcaattaggctctgaa

SEQ ID NO: 61228 - DNA, 22 bp, synthetic construct
  misc_feature 1..22: note = chemically synthesized
  source 1..22: mol_type = other DNA
caattaggctctgaaatcttgg

SEQ ID NO: 61229 - DNA, 22 bp, synthetic construct
  misc_feature 1..22: note = chemically synthesized
  source 1..22: mol_type = other DNA
aattaggctctgaaatcttggg

SEQ ID NO: 61230 - DNA, 22 bp, synthetic construct
  misc_feature 1..22: note = chemically synthesized
  source 1..22: mol_type = other DNA
ggctctgaaatcttgggcaaaa

SEQ ID NO: 61231 - DNA, 22 bp, synthetic construct
  misc_feature 1..22: note = chemically synthesized
  source 1..22: mol_type = other DNA
tgaaatcttgggcaaaatgaca

SEQ ID NO: 61232 - DNA, 22 bp, synthetic construct
  misc_feature 1..22: note = chemically synthesized
  source 1..22: mol_type = other DNA
aaatcttgggcaaaatgacaag

SEQ ID NO: 61233 - DNA, 22 bp, synthetic construct
  misc_feature 1..22: note = chemically synthesized
  source 1..22: mol_type = other DNA
gggcaaaatgacaaggggaggg

SEQ ID NO: 61234 - DNA, 22 bp, synthetic construct
  misc_feature 1..22: note = chemically synthesized
  source 1..22: mol_type = other DNA
ggcaaaatgacaaggggagggc

SEQ ID NO: 61235 - DNA, 22 bp, synthetic construct
  misc_feature 1..22: note = chemically synthesized
  source 1..22: mol_type = other DNA
ctctctcaggtcactccagtgt

SEQ ID NO: 61236 - DNA, 22 bp, synthetic construct
  misc_feature 1..22: note = chemically synthesized
  source 1..22: mol_type = other DNA
tctcaggtcactccagtgttac

SEQ ID NO: 61237 - DNA, 22 bp, synthetic construct
  misc_feature 1..22: note = chemically synthesized
  source 1..22: mol_type = other DNA
tcaggtcactccagtgttactt

SEQ ID NO: 61238 - DNA, 22 bp, synthetic construct
  misc_feature 1..22: note = chemically synthesized
  source 1..22: mol_type = other DNA
aggtcactccagtgttactttt

SEQ ID NO: 61239 - DNA, 22 bp, synthetic construct
  misc_feature 1..22: note = chemically synthesized
  source 1..22: mol_type = other DNA
cagtgttacttttaattcctag

SEQ ID NO: 61240 - DNA, 22 bp, synthetic construct
  misc_feature 1..22: note = chemically synthesized
  source 1..22: mol_type = other DNA
cttttaattcctagagggtaaa

SEQ ID NO: 61241 - DNA, 22 bp, synthetic construct
  misc_feature 1..22: note = chemically synthesized
  source 1..22: mol_type = other DNA
ttaattcctagagggtaaatat

SEQ ID NO: 61242 - DNA, 22 bp, synthetic construct
  misc_feature 1..22: note = chemically synthesized
  source 1..22: mol_type = other DNA
taattcctagagggtaaatatg

SEQ ID NO: 61243 - DNA, 22 bp, synthetic construct
  misc_feature 1..22: note = chemically synthesized
  source 1..22: mol_type = other DNA
aattcctagagggtaaatatga

SEQ ID NO: 61244 - DNA, 22 bp, synthetic construct
  misc_feature 1..22: note = chemically synthesized
  source 1..22: mol_type = other DNA
attcctagagggtaaatatgac

SEQ ID NO: 61245 - DNA, 22 bp, synthetic construct
  misc_feature 1..22: note = chemically synthesized
  source 1..22: mol_type = other DNA
ctagagggtaaatatgactcct

SEQ ID NO: 61246 - DNA, 22 bp, synthetic construct
  misc_feature 1..22: note = chemically synthesized
  source 1..22: mol_type = other DNA
gagggtaaatatgactcctttc

SEQ ID NO: 61247 - DNA, 22 bp, synthetic construct
  misc_feature 1..22: note = chemically synthesized
  source 1..22: mol_type = other DNA
ctttctctatcccaagccaacc

SEQ ID NO: 61248 - DNA, 22 bp, synthetic construct
  misc_feature 1..22: note = chemically synthesized
  source 1..22: mol_type = other DNA
tctctatcccaagccaaccaag

SEQ ID NO: 61249 - DNA, 22 bp, synthetic construct
  misc_feature 1..22: note = chemically synthesized
  source 1..22: mol_type = other DNA
ctctatcccaagccaaccaaga

SEQ ID NO: 61250 - DNA, 22 bp, synthetic construct
  misc_feature 1..22: note = chemically synthesized
  source 1..22: mol_type = other DNA
tctatcccaagccaaccaagag

SEQ ID NO: 61251 - DNA, 22 bp, synthetic construct
  misc_feature 1..22: note = chemically synthesized
  source 1..22: mol_type = other DNA
tatcccaagccaaccaagagca

SEQ ID NO: 61252 - DNA, 22 bp, synthetic construct
  misc_feature 1..22: note = chemically synthesized
  source 1..22: mol_type = other DNA
tcccaagccaaccaagagcaca

SEQ ID NO: 61253 - DNA, 22 bp, synthetic construct
  misc_feature 1..22: note = chemically synthesized
  source 1..22: mol_type = other DNA
ttaaaggaaaagtcaacatctt

SEQ ID NO: 61254 - DNA, 22 bp, synthetic construct
  misc_feature 1..22: note = chemically synthesized
  source 1..22: mol_type = other DNA
aaaggaaaagtcaacatcttct

SEQ ID NO: 61255 - DNA, 22 bp, synthetic construct
  misc_feature 1..22: note = chemically synthesized
  source 1..22: mol_type = other DNA
aaggaaaagtcaacatcttctc

SEQ ID NO: 61256 - DNA, 22 bp, synthetic construct
  misc_feature 1..22: note = chemically synthesized
  source 1..22: mol_type = other DNA
ctctctttttttttttttttga

SEQ ID NO: 61257 - DNA, 22 bp, synthetic construct
  misc_feature 1..22: note = chemically synthesized
  source 1..22: mol_type = other DNA
tctctttttttttttttttgag

SEQ ID NO: 61258 - DNA, 22 bp, synthetic construct
  misc_feature 1..22: note = chemically synthesized
  source 1..22: mol_type = other DNA
tctttttttttttttttgagac

SEQ ID NO: 61259 - DNA, 22 bp, synthetic construct
  misc_feature 1..22: note = chemically synthesized
  source 1..22: mol_type = other DNA
tttttttttttttttgagacag

SEQ ID NO: 61260 - DNA, 22 bp, synthetic construct
  misc_feature 1..22: note = chemically synthesized
  source 1..22: mol_type = other DNA
tttttttttttttgagacaggg

SEQ ID NO: 61261 - DNA, 22 bp, synthetic construct
  misc_feature 1..22: note = chemically synthesized
  source 1..22: mol_type = other DNA
ttttttttttttgagacagggt

SEQ ID NO: 61262 - DNA, 22 bp, synthetic construct
  misc_feature 1..22: note = chemically synthesized
  source 1..22: mol_type = other DNA
tttttttttttgagacagggtc

SEQ ID NO: 61263 - DNA, 22 bp, synthetic construct
  misc_feature 1..22: note = chemically synthesized
  source 1..22: mol_type = other DNA
ttttttttttgagacagggtct

SEQ ID NO: 61264 - DNA, 22 bp, synthetic construct
  misc_feature 1..22: note = chemically synthesized
  source 1..22: mol_type = other DNA
tttttttttgagacagggtctc

SEQ ID NO: 61265 - DNA, 22 bp, synthetic construct
  misc_feature 1..22: note = chemically synthesized
  source 1..22: mol_type = other DNA
ttttttttgagacagggtctca

SEQ ID NO: 61266 - DNA, 22 bp, synthetic construct
  misc_feature 1..22: note = chemically synthesized
  source 1..22: mol_type = other DNA
tttttttgagacagggtctcac

SEQ ID NO: 61267 - DNA, 22 bp, synthetic construct
  misc_feature 1..22: note = chemically synthesized
  source 1..22: mol_type = other DNA
ttttttgagacagggtctcact

SEQ ID NO: 61268 - DNA, 22 bp, synthetic construct
  misc_feature 1..22: note = chemically synthesized
  source 1..22: mol_type = other DNA
tttttgagacagggtctcacta

SEQ ID NO: 61269 - DNA, 22 bp, synthetic construct
  misc_feature 1..22: note = chemically synthesized
  source 1..22: mol_type = other DNA
ttttgagacagggtctcactat

SEQ ID NO: 61270 - DNA, 22 bp, synthetic construct
  misc_feature 1..22: note = chemically synthesized
  source 1..22: mol_type = other DNA
tttgagacagggtctcactatg

SEQ ID NO: 61271 - DNA, 22 bp, synthetic construct
  misc_feature 1..22: note = chemically synthesized
  source 1..22: mol_type = other DNA
ttgagacagggtctcactatgt

SEQ ID NO: 61272 - DNA, 22 bp, synthetic construct
  misc_feature 1..22: note = chemically synthesized
  source 1..22: mol_type = other DNA
tgagacagggtctcactatgtt

SEQ ID NO: 61273 - DNA, 22 bp, synthetic construct
  misc_feature 1..22: note = chemically synthesized
  source 1..22: mol_type = other DNA
gagacagggtctcactatgttg

SEQ ID NO: 61274 - DNA, 22 bp, synthetic construct
  misc_feature 1..22: note = chemically synthesized
  source 1..22: mol_type = other DNA
agacagggtctcactatgttgc

SEQ ID NO: 61275 - DNA, 22 bp, synthetic construct
  misc_feature 1..22: note = chemically synthesized
  source 1..22: mol_type = other DNA
actatgttgcccaggctgctct

SEQ ID NO: 61276 - DNA, 22 bp, synthetic construct
  misc_feature 1..22: note = chemically synthesized
  source 1..22: mol_type = other DNA
tgttgcccaggctgctcttgaa

SEQ ID NO: 61277 - DNA, 22 bp, synthetic construct
  misc_feature 1..22: note = chemically synthesized
  source 1..22: mol_type = other DNA
cccaggctgctcttgaattcct

SEQ ID NO: 61278 - DNA, 22 bp, synthetic construct
  misc_feature 1..22: note = chemically synthesized
  source 1..22: mol_type = other DNA
ctcttgaattcctgggctcaag

SEQ ID NO: 61279 - DNA, 22 bp, synthetic construct
  misc_feature 1..22: note = chemically synthesized
  source 1..22: mol_type = other DNA
ttgaattcctgggctcaagcag

SEQ ID NO: 61280 - DNA, 22 bp, synthetic construct
  misc_feature 1..22: note = chemically synthesized
  source 1..22: mol_type = other DNA
gaattcctgggctcaagcagtc

SEQ ID NO: 61281 - DNA, 22 bp, synthetic construct
  misc_feature 1..22: note = chemically synthesized
  source 1..22: mol_type = other DNA
aattcctgggctcaagcagtcc

SEQ ID NO: 61282 - DNA, 22 bp, synthetic construct
  misc_feature 1..22: note = chemically synthesized
  source 1..22: mol_type = other DNA
ctgggctcaagcagtcctccca

SEQ ID NO: 61283 - DNA, 22 bp, synthetic construct
  misc_feature 1..22: note = chemically synthesized
  source 1..22: mol_type = other DNA
ggctcaagcagtcctcccaccc

SEQ ID NO: 61284 - DNA, 22 bp, synthetic construct
  misc_feature 1..22: note = chemically synthesized
  source 1..22: mol_type = other DNA
aagcagtcctcccaccctacca

SEQ ID NO: 61285 - DNA, 22 bp, synthetic construct
  misc_feature 1..22: note = chemically synthesized
  source 1..22: mol_type = other DNA
ccaccctaccacagcgtcccgc

SEQ ID NO: 61286 - DNA, 22 bp, synthetic construct
  misc_feature 1..22: note = chemically synthesized
  source 1..22: mol_type = other DNA
ccacagcgtcccgcgtagctgg

SEQ ID NO: 61287 - DNA, 22 bp, synthetic construct
  misc_feature 1..22: note = chemically synthesized
  source 1..22: mol_type = other DNA
ggactacaggtgcaagccacta

SEQ ID NO: 61288 - DNA, 22 bp, synthetic construct
  misc_feature 1..22: note = chemically synthesized
  source 1..22: mol_type = other DNA
caggtgcaagccactatgtcca

SEQ ID NO: 61289 - DNA, 22 bp, synthetic construct
  misc_feature 1..22: note = chemically synthesized
  source 1..22: mol_type = other DNA
tgtccagctagccaactcctcc

SEQ ID NO: 61290 - DNA, 22 bp, synthetic construct
  misc_feature 1..22: note = chemically synthesized
  source 1..22: mol_type = other DNA
gccaactcctccttgcctgctt

SEQ ID NO: 61291 - DNA, 22 bp, synthetic construct
  misc_feature 1..22: note = chemically synthesized
  source 1..22: mol_type = other DNA
ctccttgcctgcttttcttttt

SEQ ID NO: 61292 - DNA, 22 bp, synthetic construct
  misc_feature 1..22: note = chemically synthesized
  source 1..22: mol_type = other DNA
cttgcctgcttttctttttttt

SEQ ID NO: 61293 - DNA, 22 bp, synthetic construct
  misc_feature 1..22: note = chemically synthesized
  source 1..22: mol_type = other DNA
gcctgcttttctttttttttct

SEQ ID NO: 61294 - DNA, 22 bp, synthetic construct
  misc_feature 1..22: note = chemically synthesized
  source 1..22: mol_type = other DNA
cctgcttttctttttttttctt

SEQ ID NO: 61295 - DNA, 22 bp, synthetic construct
  misc_feature 1..22: note = chemically synthesized
  source 1..22: mol_type = other DNA
cttttctttttttttctttttt

SEQ ID NO: 61296 - DNA, 22 bp, synthetic construct
  misc_feature 1..22: note = chemically synthesized
  source 1..22: mol_type = other DNA
ttctttttttttctttttttga

SEQ ID NO: 61297 - DNA, 22 bp, synthetic construct
  misc_feature 1..22: note = chemically synthesized
  source 1..22: mol_type = other DNA
tctttttttttctttttttgag

SEQ ID NO: 61298 - DNA, 22 bp, synthetic construct
  misc_feature 1..22: note = chemically synthesized
  source 1..22: mol_type = other DNA
ctttttttttctttttttgaga

SEQ ID NO: 61299 - DNA, 22 bp, synthetic construct
  misc_feature 1..22: note = chemically synthesized
  source 1..22: mol_type = other DNA
tttttttttctttttttgagac

SEQ ID NO: 61300 - DNA, 22 bp, synthetic construct
  misc_feature 1..22: note = chemically synthesized
  source 1..22: mol_type = other DNA
tttttttctttttttgagacgg

SEQ ID NO: 61301 - DNA, 22 bp, synthetic construct
  misc_feature 1..22: note = chemically synthesized
  source 1..22: mol_type = other DNA
ttttttctttttttgagacggc

SEQ ID NO: 61302 - DNA, 22 bp, synthetic construct
  misc_feature 1..22: note = chemically synthesized
  source 1..22: mol_type = other DNA
tttttctttttttgagacggcg

SEQ ID NO: 61303 - DNA, 22 bp, synthetic construct
  misc_feature 1..22: note = chemically synthesized
  source 1..22: mol_type = other DNA
ttttctttttttgagacggcgc

SEQ ID NO: 61304 - DNA, 22 bp, synthetic construct
  misc_feature 1..22: note = chemically synthesized
  source 1..22: mol_type = other DNA
tttctttttttgagacggcgca

SEQ ID NO: 61305 - DNA, 22 bp, synthetic construct
  misc_feature 1..22: note = chemically synthesized
  source 1..22: mol_type = other DNA
ttctttttttgagacggcgcac

SEQ ID NO: 61306 - DNA, 22 bp, synthetic construct
  misc_feature 1..22: note = chemically synthesized
  source 1..22: mol_type = other DNA
tctttttttgagacggcgcacc

SEQ ID NO: 61307 - DNA, 22 bp, synthetic construct
  misc_feature 1..22: note = chemically synthesized
  source 1..22: mol_type = other DNA
ctttttttgagacggcgcacct

SEQ ID NO: 61308 - DNA, 22 bp, synthetic construct
  misc_feature 1..22: note = chemically synthesized
  source 1..22: mol_type = other DNA
tttttttgagacggcgcaccta

SEQ ID NO: 61309 - DNA, 22 bp, synthetic construct
  misc_feature 1..22: note = chemically synthesized
  source 1..22: mol_type = other DNA
tttttgagacggcgcacctatc

SEQ ID NO: 61310 - DNA, 22 bp, synthetic construct
  misc_feature 1..22: note = chemically synthesized
  source 1..22: mol_type = other DNA
ttttgagacggcgcacctatca

SEQ ID NO: 61311 - DNA, 22 bp, synthetic construct
  misc_feature 1..22: note = chemically synthesized
  source 1..22: mol_type = other DNA
tttgagacggcgcacctatcac

SEQ ID NO: 61312 - DNA, 22 bp, synthetic construct
  misc_feature 1..22: note = chemically synthesized
  source 1..22: mol_type = other DNA
ttgagacggcgcacctatcacc

SEQ ID NO: 61313 - DNA, 22 bp, synthetic construct
  misc_feature 1..22: note = chemically synthesized
  source 1..22: mol_type = other DNA
tgagacggcgcacctatcaccc

SEQ ID NO: 61314 - DNA, 22 bp, synthetic construct
  misc_feature 1..22: note = chemically synthesized
  source 1..22: mol_type = other DNA
gagacggcgcacctatcaccca

SEQ ID NO: 61315 - DNA, 22 bp, synthetic construct
  misc_feature 1..22: note = chemically synthesized
  source 1..22: mol_type = other DNA
agacggcgcacctatcacccag

SEQ ID NO: 61316 - DNA, 22 bp, synthetic construct
  misc_feature 1..22: note = chemically synthesized
  source 1..22: mol_type = other DNA
tcacccaggctggagtggagtg

SEQ ID NO: 61317 - DNA, 22 bp, synthetic construct
  misc_feature 1..22: note = chemically synthesized
  source 1..22: mol_type = other DNA
gagtggagtggcacgatcttgg

SEQ ID NO: 61318 - DNA, 22 bp, synthetic construct
  misc_feature 1..22: note = chemically synthesized
  source 1..22: mol_type = other DNA
ggctcactgcaacctcttcctc

SEQ ID NO: 61319 - DNA, 22 bp, synthetic construct
  misc_feature 1..22: note = chemically synthesized
  source 1..22: mol_type = other DNA
gctcactgcaacctcttcctcc

SEQ ID NO: 61320 - DNA, 22 bp, synthetic construct
  misc_feature 1..22: note = chemically synthesized
  source 1..22: mol_type = other DNA
actgcaacctcttcctcctggt

SEQ ID NO: 61321 - DNA, 22 bp, synthetic construct
  misc_feature 1..22: note = chemically synthesized
  source 1..22: mol_type = other DNA
caacctcttcctcctggttcaa

SEQ ID NO: 61322 - DNA, 22 bp, synthetic construct
  misc_feature 1..22: note = chemically synthesized
  source 1..22: mol_type = other DNA
ttcctcctggttcaagcgattc

SEQ ID NO: 61323 - DNA, 22 bp, synthetic construct
  misc_feature 1..22: note = chemically synthesized
  source 1..22: mol_type = other DNA
cctcctggttcaagcgattctc

SEQ ID NO: 61324 - DNA, 22 bp, synthetic construct
  misc_feature 1..22: note = chemically synthesized
  source 1..22: mol_type = other DNA
ctcctggttcaagcgattctca

SEQ ID NO: 61325 - DNA, 22 bp, synthetic construct
  misc_feature 1..22: note = chemically synthesized
  source 1..22: mol_type = other DNA
ctggttcaagcgattctcatgt

SEQ ID NO: 61326 - DNA, 22 bp, synthetic construct
  misc_feature 1..22: note = chemically synthesized
  source 1..22: mol_type = other DNA
gttcaagcgattctcatgtctc

SEQ ID NO: 61327 - DNA, 22 bp, synthetic construct
  misc_feature 1..22: note = chemically synthesized
  source 1..22: mol_type = other DNA
aagcgattctcatgtctcagcc

SEQ ID NO: 61328 - DNA, 22 bp, synthetic construct
  misc_feature 1..22: note = chemically synthesized
  source 1..22: mol_type = other DNA
tcatgtctcagcctcctcagta

SEQ ID NO: 61329 - DNA, 22 bp, synthetic construct
  misc_feature 1..22: note = chemically synthesized
  source 1..22: mol_type = other DNA
atgtctcagcctcctcagtagc

SEQ ID NO: 61330 - DNA, 22 bp, synthetic construct
  misc_feature 1..22: note = chemically synthesized
  source 1..22: mol_type = other DNA
agcctcctcagtagctaggact

SEQ ID NO: 61331 - DNA, 22 bp, synthetic construct
  misc_feature 1..22: note = chemically synthesized
  source 1..22: mol_type = other DNA
ctcagtagctaggactaccggc

SEQ ID NO: 61332 - DNA, 22 bp, synthetic construct
  misc_feature 1..22: note = chemically synthesized
  source 1..22: mol_type = other DNA
agtagctaggactaccggcgtg

SEQ ID NO: 61333 - DNA, 22 bp, synthetic construct
  misc_feature 1..22: note = chemically synthesized
  source 1..22: mol_type = other DNA
ggactaccggcgtgcaccacca

SEQ ID NO: 61334 - DNA, 22 bp, synthetic construct
  misc_feature 1..22: note = chemically synthesized
  source 1..22: mol_type = other DNA
ccggcgtgcaccaccatgccag

SEQ ID NO: 61335 - DNA, 22 bp, synthetic construct
  misc_feature 1..22: note = chemically synthesized
  source 1..22: mol_type = other DNA
atttttatatttttagaatttt

SEQ ID NO: 61336 - DNA, 22 bp, synthetic construct
  misc_feature 1..22: note = chemically synthesized
  source 1..22: mol_type = other DNA
ttatatttttagaattttagaa

SEQ ID NO: 61337 - DNA, 22 bp, synthetic construct
  misc_feature 1..22: note = chemically synthesized
  source 1..22: mol_type = other DNA
tatatttttagaattttagaag

SEQ ID NO: 61338 - DNA, 22 bp, synthetic construct
  misc_feature 1..22: note = chemically synthesized
  source 1..22: mol_type = other DNA
atatttttagaattttagaaga

SEQ ID NO: 61339 - DNA, 22 bp, synthetic construct
  misc_feature 1..22: note = chemically synthesized
  source 1..22: mol_type = other DNA
tatttttagaattttagaagag

SEQ ID NO: 61340 - DNA, 22 bp, synthetic construct
  misc_feature 1..22: note = chemically synthesized
  source 1..22: mol_type = other DNA
ttagaattttagaagagatggg

SEQ ID NO: 61341 - DNA, 22 bp, synthetic construct
  misc_feature 1..22: note = chemically synthesized
  source 1..22: mol_type = other DNA
tagaattttagaagagatggga

SEQ ID NO: 61342 - DNA, 22 bp, synthetic construct
  misc_feature 1..22: note = chemically synthesized
  source 1..22: mol_type = other DNA
agaattttagaagagatgggat

SEQ ID NO: 61343 - DNA, 22 bp, synthetic construct
  misc_feature 1..22: note = chemically synthesized
  source 1..22: mol_type = other DNA
gaattttagaagagatgggatt

SEQ ID NO: 61344 - DNA, 22 bp, synthetic construct
  misc_feature 1..22: note = chemically synthesized
  source 1..22: mol_type = other DNA
tagaagagatgggatttcatca

SEQ ID NO: 61345 - DNA, 22 bp, synthetic construct
  misc_feature 1..22: note = chemically synthesized
  source 1..22: mol_type = other DNA
agaagagatgggatttcatcat

SEQ ID NO: 61346 - DNA, 22 bp, synthetic construct
  misc_feature 1..22: note = chemically synthesized
  source 1..22: mol_type = other DNA
gaagagatgggatttcatcatg

SEQ ID NO: 61347 - DNA, 22 bp, synthetic construct
  misc_feature 1..22: note = chemically synthesized
  source 1..22: mol_type = other DNA
catcatgttggccaggctggtc

SEQ ID NO: 61348 - DNA, 22 bp, synthetic construct
  misc_feature 1..22: note = chemically synthesized
  source 1..22: mol_type = other DNA
atcatgttggccaggctggtct

SEQ ID NO: 61349 - DNA, 22 bp, synthetic construct
  misc_feature 1..22: note = chemically synthesized
  source 1..22: mol_type = other DNA
gccaggctggtctcgaactcct

SEQ ID NO: 61350 - DNA, 22 bp, synthetic construct
  misc_feature 1..22: note = chemically synthesized
  source 1..22: mol_type = other DNA
gtctcgaactcctgacctcaag

SEQ ID NO: 61351 - DNA, 22 bp, synthetic construct
  misc_feature 1..22: note = chemically synthesized
  source 1..22: mol_type = other DNA
gaactcctgacctcaagtgatc

SEQ ID NO: 61352 - DNA, 22 bp, synthetic construct
  misc_feature 1..22: note = chemically synthesized
  source 1..22: mol_type = other DNA
ctgacctcaagtgatccacctg

SEQ ID NO: 61353 - DNA, 22 bp, synthetic construct
  misc_feature 1..22: note = chemically synthesized
  source 1..22: mol_type = other DNA
acctcaagtgatccacctgcct

SEQ ID NO: 61354 - DNA, 22 bp, synthetic construct
  misc_feature 1..22: note = chemically synthesized
  source 1..22: mol_type = other DNA
aagtgatccacctgccttggcc

SEQ ID NO: 61355 - DNA, 22 bp, synthetic construct
  misc_feature 1..22: note = chemically synthesized
  source 1..22: mol_type = other DNA
ccttggcctcccaaggtgctag

SEQ ID NO: 61356 - DNA, 22 bp, synthetic construct
  misc_feature 1..22: note = chemically synthesized
  source 1..22: mol_type = other DNA
ggcctcccaaggtgctaggatt

SEQ ID NO: 61357 - DNA, 22 bp, synthetic construct
  misc_feature 1..22: note = chemically synthesized
  source 1..22: mol_type = other DNA
gcctcccaaggtgctaggatta

SEQ ID NO: 61358 - DNA, 22 bp, synthetic construct
  misc_feature 1..22: note = chemically synthesized
  source 1..22: mol_type = other DNA
ccaaggtgctaggattacaggc

SEQ ID NO: 61359 - DNA, 22 bp, synthetic construct
  misc_feature 1..22: note = chemically synthesized
  source 1..22: mol_type = other DNA
ggattacaggcatgagccaccg

SEQ ID NO: 61360 - DNA, 22 bp, synthetic construct
  misc_feature 1..22: note = chemically synthesized
  source 1..22: mol_type = other DNA
caggcatgagccaccgcaccgg

SEQ ID NO: 61361 - DNA, 22 bp, synthetic construct
  misc_feature 1..22: note = chemically synthesized
  source 1..22: mol_type = other DNA
cttgcctgtttttcaatctcat

SEQ ID NO: 61362 - DNA, 22 bp, synthetic construct
  misc_feature 1..22: note = chemically synthesized
  source 1..22: mol_type = other DNA
gcctgtttttcaatctcatctg

SEQ ID NO: 61363 - DNA, 22 bp, synthetic construct
  misc_feature 1..22: note = chemically synthesized
  source 1..22: mol_type = other DNA
cctgtttttcaatctcatctga

SEQ ID NO: 61364 - DNA, 22 bp, synthetic construct
  misc_feature 1..22: note = chemically synthesized
  source 1..22: mol_type = other DNA
tttttcaatctcatctgatatg

SEQ ID NO: 61365 - DNA, 22 bp, synthetic construct
  misc_feature 1..22: note = chemically synthesized
  source 1..22: mol_type = other DNA
ttcaatctcatctgatatgcag

SEQ ID NO: 61366 - DNA, 22 bp, synthetic construct
  misc_feature 1..22: note = chemically synthesized
  source 1..22: mol_type = other DNA
tcaatctcatctgatatgcaga

SEQ ID NO: 61367 - DNA, 22 bp, synthetic construct
  misc_feature 1..22: note = chemically synthesized
  source 1..22: mol_type = other DNA
caatctcatctgatatgcagag

SEQ ID NO: 61368 - DNA, 22 bp, synthetic construct
  misc_feature 1..22: note = chemically synthesized
  source 1..22: mol_type = other DNA
aatctcatctgatatgcagagt

SEQ ID NO: 61369 - DNA, 22 bp, synthetic construct
  misc_feature 1..22: note = chemically synthesized
  source 1..22: mol_type = other DNA
atctgatatgcagagtatttct

SEQ ID NO: 61370 - DNA, 22 bp, synthetic construct
  misc_feature 1..22: note = chemically synthesized
  source 1..22: mol_type = other DNA
atatgcagagtatttctgcccc

SEQ ID NO: 61371 - DNA, 22 bp, synthetic construct
  misc_feature 1..22: note = chemically synthesized
  source 1..22: mol_type = other DNA
ctgccccacccacctacccccc

SEQ ID NO: 61372 - DNA, 22 bp, synthetic construct
  misc_feature 1..22: note = chemically synthesized
  source 1..22: mol_type = other DNA
tgccccacccacctacccccca

SEQ ID NO: 61373 - DNA, 22 bp, synthetic construct
  misc_feature 1..22: note = chemically synthesized
  source 1..22: mol_type = other DNA
ccccacccacctaccccccaaa

SEQ ID NO: 61374 - DNA, 22 bp, synthetic construct
  misc_feature 1..22: note = chemically synthesized
  source 1..22: mol_type = other DNA
ccccccaaaaaaagctgaagcc

SEQ ID NO: 61375 - DNA, 22 bp, synthetic construct
  misc_feature 1..22: note = chemically synthesized
  source 1..22: mol_type = other DNA
aagcctatttatttgaaagtcc

SEQ ID NO: 61376 - DNA, 22 bp, synthetic construct
  misc_feature 1..22: note = chemically synthesized
  source 1..22: mol_type = other DNA
tttatttgaaagtccttgtttt

SEQ ID NO: 61377 - DNA, 22 bp, synthetic construct
  misc_feature 1..22: note = chemically synthesized
  source 1..22: mol_type = other DNA
atttgaaagtccttgtttttgc

SEQ ID NO: 61378 - DNA, 22 bp, synthetic construct
  misc_feature 1..22: note = chemically synthesized
  source 1..22: mol_type = other DNA
tttgaaagtccttgtttttgct

SEQ ID NO: 61379 - DNA, 22 bp, synthetic construct
  misc_feature 1..22: note = chemically synthesized
  source 1..22: mol_type = other DNA
gaaagtccttgtttttgctact

SEQ ID NO: 61380 - DNA, 22 bp, synthetic construct
  misc_feature 1..22: note = chemically synthesized
  source 1..22: mol_type = other DNA
aaagtccttgtttttgctacta

SEQ ID NO: 61381 - DNA, 22 bp, synthetic construct
  misc_feature 1..22: note = chemically synthesized
  source 1..22: mol_type = other DNA
gtttttgctactaattatatag

SEQ ID NO: 61382 - DNA, 22 bp, synthetic construct
  misc_feature 1..22: note = chemically synthesized
  source 1..22: mol_type = other DNA
tttttgctactaattatatagt

SEQ ID NO: 61383 - DNA, 22 bp, synthetic construct
  misc_feature 1..22: note = chemically synthesized
  source 1..22: mol_type = other DNA
ttgctactaattatatagtata

SEQ ID NO: 61384 - DNA, 22 bp, synthetic construct
  misc_feature 1..22: note = chemically synthesized
  source 1..22: mol_type = other DNA
tgctactaattatatagtatac

SEQ ID NO: 61385 - DNA, 22 bp, synthetic construct
  misc_feature 1..22: note = chemically synthesized
  source 1..22: mol_type = other DNA
gctactaattatatagtatacc

SEQ ID NO: 61386 - DNA, 22 bp, synthetic construct
  misc_feature 1..22: note = chemically synthesized
  source 1..22: mol_type = other DNA
ctactaattatatagtatacca

SEQ ID NO: 61387 - DNA, 22 bp, synthetic construct
  misc_feature 1..22: note = chemically synthesized
  source 1..22: mol_type = other DNA
ctaattatatagtataccatac

SEQ ID NO: 61388 - DNA, 22 bp, synthetic construct
  misc_feature 1..22: note = chemically synthesized
  source 1..22: mol_type = other DNA
attatatagtataccatacatt

SEQ ID NO: 61389 - DNA, 22 bp, synthetic construct
  misc_feature 1..22: note = chemically synthesized
  source 1..22: mol_type = other DNA
tatagtataccatacattatca

SEQ ID NO: 61390 - DNA, 22 bp, synthetic construct
  misc_feature 1..22: note = chemically synthesized
  source 1..22: mol_type = other DNA
tcattcaaaacaaccatcctgc

SEQ ID NO: 61391 - DNA, 22 bp, synthetic construct
  misc_feature 1..22: note = chemically synthesized
  source 1..22: mol_type = other DNA
aaaacaaccatcctgctcataa

SEQ ID NO: 61392 - DNA, 22 bp, synthetic construct
  misc_feature 1..22: note = chemically synthesized
  source 1..22: mol_type = other DNA
ctcataacatctttgaaaagaa

SEQ ID NO: 61393 - DNA, 22 bp, synthetic construct
  misc_feature 1..22: note = chemically synthesized
  source 1..22: mol_type = other DNA
ataacatctttgaaaagaaaaa

SEQ ID NO: 61394 - DNA, 22 bp, synthetic construct
  misc_feature 1..22: note = chemically synthesized
  source 1..22: mol_type = other DNA
tgaaaagaaaaatatatatgtg

SEQ ID NO: 61395 - DNA, 22 bp, synthetic construct
  misc_feature 1..22: note = chemically synthesized
  source 1..22: mol_type = other DNA
gaaaagaaaaatatatatgtgc

SEQ ID NO: 61396 - DNA, 22 bp, synthetic construct
  misc_feature 1..22: note = chemically synthesized
  source 1..22: mol_type = other DNA
aaaagaaaaatatatatgtgca

SEQ ID NO: 61397 - DNA, 22 bp, synthetic construct
  misc_feature 1..22: note = chemically synthesized
  source 1..22: mol_type = other DNA
tattaaagcaacattttattta

SEQ ID NO: 61398 - DNA, 22 bp, synthetic construct
  misc_feature 1..22: note = chemically synthesized
  source 1..22: mol_type = other DNA
attaaagcaacattttatttaa

SEQ ID NO: 61399 - DNA, 22 bp, synthetic construct
  misc_feature 1..22: note = chemically synthesized
  source 1..22: mol_type = other DNA
ttaaagcaacattttatttaag

SEQ ID NO: 61400 - DNA, 22 bp, synthetic construct
  misc_feature 1..22: note = chemically synthesized
  source 1..22: mol_type = other DNA
aagcaacattttatttaagaat

SEQ ID NO: 61401 - DNA, 22 bp, synthetic construct
  misc_feature 1..22: note = chemically synthesized
  source 1..22: mol_type = other DNA
tatttaagaataaagtcttgtt

SEQ ID NO: 61402 - DNA, 22 bp, synthetic construct
  misc_feature 1..22: note = chemically synthesized
  source 1..22: mol_type = other DNA
atttaagaataaagtcttgtta

SEQ ID NO: 61403 - DNA, 22 bp, synthetic construct
  misc_feature 1..22: note = chemically synthesized
  source 1..22: mol_type = other DNA
tttaagaataaagtcttgttaa

SEQ ID NO: 61404 - DNA, 22 bp, synthetic construct
  misc_feature 1..22: note = chemically synthesized
  source 1..22: mol_type = other DNA
aagaataaagtcttgttaatta

SEQ ID NO: 61405 - DNA, 22 bp, synthetic construct
  misc_feature 1..22: note = chemically synthesized
  source 1..22: mol_type = other DNA
agaataaagtcttgttaattac

SEQ ID NO: 61406 - DNA, 22 bp, synthetic construct
  misc_feature 1..22: note = chemically synthesized
  source 1..22: mol_type = other DNA
gttaattactatattttagatg

SEQ ID NO: 61407 - DNA, 22 bp, synthetic construct
  misc_feature 1..22: note = chemically synthesized
  source 1..22: mol_type = other DNA
ttaattactatattttagatgc

SEQ ID NO: 61408 - DNA, 22 bp, synthetic construct
  misc_feature 1..22: note = chemically synthesized
  source 1..22: mol_type = other DNA
attactatattttagatgcaat

SEQ ID NO: 61409 - DNA, 22 bp, synthetic construct
  misc_feature 1..22: note = chemically synthesized
  source 1..22: mol_type = other DNA
ctatattttagatgcaatgtga

SEQ ID NO: 61410 - DNA, 22 bp, synthetic construct
  misc_feature 1..22: note = chemically synthesized
  source 1..22: mol_type = other DNA
tattttagatgcaatgtgatct

SEQ ID NO: 61411 - DNA, 22 bp, synthetic construct
  misc_feature 1..22: note = chemically synthesized
  source 1..22: mol_type = other DNA
tagatgcaatgtgatctgaagt

SEQ ID NO: 61412 - DNA, 22 bp, synthetic construct
  misc_feature 1..22: note = chemically synthesized
  source 1..22: mol_type = other DNA
agatgcaatgtgatctgaagtt

SEQ ID NO: 61413 - DNA, 22 bp, synthetic construct
  misc_feature 1..22: note = chemically synthesized
  source 1..22: mol_type = other DNA
gatgcaatgtgatctgaagttt

SEQ ID NO: 61414 - DNA, 22 bp, synthetic construct
  misc_feature 1..22: note = chemically synthesized
  source 1..22: mol_type = other DNA
aagtttctaattctggcccaac

SEQ ID NO: 61415 - DNA, 22 bp, synthetic construct
  misc_feature 1..22: note = chemically synthesized
  source 1..22: mol_type = other DNA
ctaattctggcccaactaaatt

SEQ ID NO: 61416 - DNA, 22 bp, synthetic construct
  misc_feature 1..22: note = chemically synthesized
  source 1..22: mol_type = other DNA
taattctggcccaactaaattt

SEQ ID NO: 61417 - DNA, 22 bp, synthetic construct
  misc_feature 1..22: note = chemically synthesized
  source 1..22: mol_type = other DNA
attctggcccaactaaatttct

SEQ ID NO: 61418 - DNA, 22 bp, synthetic construct
  misc_feature 1..22: note = chemically synthesized
  source 1..22: mol_type = other DNA
tggcccaactaaatttctagct

SEQ ID NO: 61419 - DNA, 22 bp, synthetic construct
  misc_feature 1..22: note = chemically synthesized
  source 1..22: mol_type = other DNA
gcccaactaaatttctagctct

SEQ ID NO: 61420 - DNA, 22 bp, synthetic construct
  misc_feature 1..22: note = chemically synthesized
  source 1..22: mol_type = other DNA
aatttctagctctgtttcccta

SEQ ID NO: 61421 - DNA, 22 bp, synthetic construct
  misc_feature 1..22: note = chemically synthesized
  source 1..22: mol_type = other DNA
ctagctctgtttccctaaacaa

SEQ ID NO: 61422 - DNA, 22 bp, synthetic construct
  misc_feature 1..22: note = chemically synthesized
  source 1..22: mol_type = other DNA
tagctctgtttccctaaacaaa

SEQ ID NO: 61423 - DNA, 22 bp, synthetic construct
  misc_feature 1..22: note = chemically synthesized
  source 1..22: mol_type = other DNA
gctctgtttccctaaacaaata

SEQ ID NO: 61424 - DNA, 22 bp, synthetic construct
  misc_feature 1..22: note = chemically synthesized
  source 1..22: mol_type = other DNA
tgtttccctaaacaaataattt

SEQ ID NO: 61425 - DNA, 22 bp, synthetic construct
  misc_feature 1..22: note = chemically synthesized
  source 1..22: mol_type = other DNA
tttccctaaacaaataatttgg

SEQ ID NO: 61426 - DNA, 22 bp, synthetic construct
  misc_feature 1..22: note = chemically synthesized
  source 1..22: mol_type = other DNA
ccctaaacaaataatttggttt

SEQ ID NO: 61427 - DNA, 22 bp, synthetic construct
  misc_feature 1..22: note = chemically synthesized
  source 1..22: mol_type = other DNA
cctaaacaaataatttggtttc

SEQ ID NO: 61428 - DNA, 22 bp, synthetic construct
  misc_feature 1..22: note = chemically synthesized
  source 1..22: mol_type = other DNA
aacaaataatttggtttctctg

SEQ ID NO: 61429 - DNA, 22 bp, synthetic construct
  misc_feature 1..22: note = chemically synthesized
  source 1..22: mol_type = other DNA
ggtttctctgtgcctgcatttt

SEQ ID NO: 61430 - DNA, 22 bp, synthetic construct
  misc_feature 1..22: note = chemically synthesized
  source 1..22: mol_type = other DNA
gtttctctgtgcctgcattttc

SEQ ID NO: 61431 - DNA, 22 bp, synthetic construct
  misc_feature 1..22: note = chemically synthesized
  source 1..22: mol_type = other DNA
ctctgtgcctgcattttccctt

SEQ ID NO: 61432 - DNA, 22 bp, synthetic construct
  misc_feature 1..22: note = chemically synthesized
  source 1..22: mol_type = other DNA
tctgtgcctgcattttcccttt

SEQ ID NO: 61433 - DNA, 22 bp, synthetic construct
  misc_feature 1..22: note = chemically synthesized
  source 1..22: mol_type = other DNA
tgtgcctgcattttccctttgg

SEQ ID NO: 61434 - DNA, 22 bp, synthetic construct
  misc_feature 1..22: note = chemically synthesized
  source 1..22: mol_type = other DNA
tgcctgcattttccctttggag

SEQ ID NO: 61435 - DNA, 22 bp, synthetic construct
  misc_feature 1..22: note = chemically synthesized
  source 1..22: mol_type = other DNA
cattttccctttggagaagaaa

SEQ ID NO: 61436 - DNA, 22 bp, synthetic construct
  misc_feature 1..22: note = chemically synthesized
  source 1..22: mol_type = other DNA
tccctttggagaagaaaagtgc

SEQ ID NO: 61437 - DNA, 22 bp, synthetic construct
  misc_feature 1..22: note = chemically synthesized
  source 1..22: mol_type = other DNA
ccctttggagaagaaaagtgct

SEQ ID NO: 61438 - DNA, 22 bp, synthetic construct
  misc_feature 1..22: note = chemically synthesized
  source 1..22: mol_type = other DNA
cctttggagaagaaaagtgctc

SEQ ID NO: 61439 - DNA, 22 bp, synthetic construct
  misc_feature 1..22: note = chemically synthesized
  source 1..22: mol_type = other DNA
tggagaagaaaagtgctctctc

SEQ ID NO: 61440 - DNA, 22 bp, synthetic construct
  misc_feature 1..22: note = chemically synthesized
  source 1..22: mol_type = other DNA
ggagaagaaaagtgctctctct

SEQ ID NO: 61441 - DNA, 22 bp, synthetic construct
  misc_feature 1..22: note = chemically synthesized
  source 1..22: mol_type = other DNA
gagaagaaaagtgctctctctt

SEQ ID NO: 61442 - DNA, 22 bp, synthetic construct
  misc_feature 1..22: note = chemically synthesized
  source 1..22: mol_type = other DNA
tctcttgagttgaccgagagtc

SEQ ID NO: 61443 - DNA, 22 bp, synthetic construct
  misc_feature 1..22: note = chemically synthesized
  source 1..22: mol_type = other DNA
tcttgagttgaccgagagtccc

SEQ ID NO: 61444 - DNA, 22 bp, synthetic construct
  misc_feature 1..22: note = chemically synthesized
  source 1..22: mol_type = other DNA
ttgagttgaccgagagtcccat

SEQ ID NO: 61445 - DNA, 22 bp, synthetic construct
  misc_feature 1..22: note = chemically synthesized
  source 1..22: mol_type = other DNA
gagttgaccgagagtcccatta

SEQ ID NO: 61446 - DNA, 22 bp, synthetic construct
  misc_feature 1..22: note = chemically synthesized
  source 1..22: mol_type = other DNA
agttgaccgagagtcccattag

SEQ ID NO: 61447 - DNA, 22 bp, synthetic construct
  misc_feature 1..22: note = chemically synthesized
  source 1..22: mol_type = other DNA
accgagagtcccattagggata

SEQ ID NO: 61448 - DNA, 22 bp, synthetic construct
  misc_feature 1..22: note = chemically synthesized
  source 1..22: mol_type = other DNA
gggatagggagacttaaatgca

SEQ ID NO: 61449 - DNA, 22 bp, synthetic construct
  misc_feature 1..22: note = chemically synthesized
  source 1..22: mol_type = other DNA
aaatgcatccacaggggcacag

SEQ ID NO: 61450 - DNA, 22 bp, synthetic construct
  misc_feature 1..22: note = chemically synthesized
  source 1..22: mol_type = other DNA
aatgcatccacaggggcacagg

SEQ ID NO: 61451 - DNA, 22 bp, synthetic construct
  misc_feature 1..22: note = chemically synthesized
  source 1..22: mol_type = other DNA
agcacataaacggaggcccaaa

SEQ ID NO: 61452 - DNA, 22 bp, synthetic construct
  misc_feature 1..22: note = chemically synthesized
  source 1..22: mol_type = other DNA
agagttggccaagaatgaacat

SEQ ID NO: 61453 - DNA, 22 bp, synthetic construct
  misc_feature 1..22: note = chemically synthesized
  source 1..22: mol_type = other DNA
gccaagaatgaacattggctac

SEQ ID NO: 61454 - DNA, 22 bp, synthetic construct
  misc_feature 1..22: note = chemically synthesized
  source 1..22: mol_type = other DNA
gctaccagaccacaagtcagca

SEQ ID NO: 61455 - DNA, 22 bp, synthetic construct
  misc_feature 1..22: note = chemically synthesized
  source 1..22: mol_type = other DNA
ccagaccacaagtcagcatgag

SEQ ID NO: 61456 - DNA, 22 bp, synthetic construct
  misc_feature 1..22: note = chemically synthesized
  source 1..22: mol_type = other DNA
ctctatggcatcaaattgcaac

SEQ ID NO: 61457 - DNA, 22 bp, synthetic construct
  misc_feature 1..22: note = chemically synthesized
  source 1..22: mol_type = other DNA
tatggcatcaaattgcaacttg

SEQ ID NO: 61458 - DNA, 22 bp, synthetic construct
  misc_feature 1..22: note = chemically synthesized
  source 1..22: mol_type = other DNA
tggcatcaaattgcaacttgag

SEQ ID NO: 61459 - DNA, 22 bp, synthetic construct
  misc_feature 1..22: note = chemically synthesized
  source 1..22: mol_type = other DNA
caacttgagagtagatgggcag

SEQ ID NO: 61460 - DNA, 22 bp, synthetic construct
  misc_feature 1..22: note = chemically synthesized
  source 1..22: mol_type = other DNA
gagagtagatgggcagggtcac

SEQ ID NO: 61461 - DNA, 22 bp, synthetic construct
  misc_feature 1..22: note = chemically synthesized
  source 1..22: mol_type = other DNA
agagtagatgggcagggtcact

SEQ ID NO: 61462 - DNA, 22 bp, synthetic construct
  misc_feature 1..22: note = chemically synthesized
  source 1..22: mol_type = other DNA
tcaaattaagcaatcagggcac

SEQ ID NO: 61463 - DNA, 22 bp, synthetic construct
  misc_feature 1..22: note = chemically synthesized
  source 1..22: mol_type = other DNA
agcaatcagggcacacaagttg

SEQ ID NO: 61464 - DNA, 22 bp, synthetic construct
  misc_feature 1..22: note = chemically synthesized
  source 1..22: mol_type = other DNA
cagtaacacaacaagactaggc

SEQ ID NO: 61465 - DNA, 22 bp, synthetic construct
  misc_feature 1..22: note = chemically synthesized
  source 1..22: mol_type = other DNA
ggccagctctggaatccagtaa

SEQ ID NO: 61466 - DNA, 22 bp, synthetic construct
  misc_feature 1..22: note = chemically synthesized
  source 1..22: mol_type = other DNA
tggaatccagtaactcagtgtc

SEQ ID NO: 61467 - DNA, 22 bp, synthetic construct
  misc_feature 1..22: note = chemically synthesized
  source 1..22: mol_type = other DNA
gaatccagtaactcagtgtcag

SEQ ID NO: 61468 - DNA, 22 bp, synthetic construct
  misc_feature 1..22: note = chemically synthesized
  source 1..22: mol_type = other DNA
agtgtcagcaaggttttgggtt

SEQ ID NO: 61469 - DNA, 22 bp, synthetic construct
  misc_feature 1..22: note = chemically synthesized
  source 1..22: mol_type = other DNA
tgggttatagttcaagaaagtc

SEQ ID NO: 61470 - DNA, 22 bp, synthetic construct
  misc_feature 1..22: note = chemically synthesized
  source 1..22: mol_type = other DNA
gggttatagttcaagaaagtct

SEQ ID NO: 61471 - DNA, 22 bp, synthetic construct
  misc_feature 1..22: note = chemically synthesized
  source 1..22: mol_type = other DNA
ggttatagttcaagaaagtcta

SEQ ID NO: 61472 - DNA, 22 bp, synthetic construct
  misc_feature 1..22: note = chemically synthesized
  source 1..22: mol_type = other DNA
tagttcaagaaagtctaaacag

SEQ ID NO: 61473 - DNA, 22 bp, synthetic construct
  misc_feature 1..22: note = chemically synthesized
  source 1..22: mol_type = other DNA
aagaaagtctaaacagagccag

SEQ ID NO: 61474 - DNA, 22 bp, synthetic construct
  misc_feature 1..22: note = chemically synthesized
  source 1..22: mol_type = other DNA
aacagagccagtcacagcacca

SEQ ID NO: 61475 - DNA, 22 bp, synthetic construct
  misc_feature 1..22: note = chemically synthesized
  source 1..22: mol_type = other DNA
aagggagctattgcaggtttct

SEQ ID NO: 61476 - DNA, 22 bp, synthetic construct
  misc_feature 1..22: note = chemically synthesized
  source 1..22: mol_type = other DNA
ttgcaggtttctctgctaagag

SEQ ID NO: 61477 - DNA, 22 bp, synthetic construct
  misc_feature 1..22: note = chemically synthesized
  source 1..22: mol_type = other DNA
caggtttctctgctaagagatt

SEQ ID NO: 61478 - DNA, 22 bp, synthetic construct
  misc_feature 1..22: note = chemically synthesized
  source 1..22: mol_type = other DNA
ctctgctaagagatttatttca

SEQ ID NO: 61479 - DNA, 22 bp, synthetic construct
  misc_feature 1..22: note = chemically synthesized
  source 1..22: mol_type = other DNA
tctgctaagagatttatttcat

SEQ ID NO: 61480 - DNA, 22 bp, synthetic construct
  misc_feature 1..22: note = chemically synthesized
  source 1..22: mol_type = other DNA
tgctaagagatttatttcatcc

SEQ ID NO: 61481 - DNA, 22 bp, synthetic construct
  misc_feature 1..22: note = chemically synthesized
  source 1..22: mol_type = other DNA
ctaagagatttatttcatcctg

SEQ ID NO: 61482 - DNA, 22 bp, synthetic construct
  misc_feature 1..22: note = chemically synthesized
  source 1..22: mol_type = other DNA
agagatttatttcatcctgggt

SEQ ID NO: 61483 - DNA, 22 bp, synthetic construct
  misc_feature 1..22: note = chemically synthesized
  source 1..22: mol_type = other DNA
atttcatcctgggtgcagggtt

SEQ ID NO: 61484 - DNA, 22 bp, synthetic construct
  misc_feature 1..22: note = chemically synthesized
  source 1..22: mol_type = other DNA
tttcatcctgggtgcagggttc

SEQ ID NO: 61485 - DNA, 22 bp, synthetic construct
  misc_feature 1..22: note = chemically synthesized
  source 1..22: mol_type = other DNA
catcctgggtgcagggttcgac

SEQ ID NO: 61486 - DNA, 22 bp, synthetic construct
  misc_feature 1..22: note = chemically synthesized
  source 1..22: mol_type = other DNA
atcctgggtgcagggttcgacc

SEQ ID NO: 61487 - DNA, 22 bp, synthetic construct
  misc_feature 1..22: note = chemically synthesized
  source 1..22: mol_type = other DNA
ggtgcagggttcgacctccaaa

SEQ ID NO: 61488 - DNA, 22 bp, synthetic construct
  misc_feature 1..22: note = chemically synthesized
  source 1..22: mol_type = other DNA
gacctccaaaggcctcaaatca

SEQ ID NO: 61489 - DNA, 22 bp, synthetic construct
  misc_feature 1..22: note = chemically synthesized
  source 1..22: mol_type = other DNA
caaaggcctcaaatcatcaccg

SEQ ID NO: 61490 - DNA, 22 bp, synthetic construct
  misc_feature 1..22: note = chemically synthesized
  source 1..22: mol_type = other DNA
aaatcatcaccgtatcaatgga

SEQ ID NO: 61491 - DNA, 22 bp, synthetic construct
  misc_feature 1..22: note = chemically synthesized
  source 1..22: mol_type = other DNA
cctgagggtaagctccgctatt

SEQ ID NO: 61492 - DNA, 22 bp, synthetic construct
  misc_feature 1..22: note = chemically synthesized
  source 1..22: mol_type = other DNA
ctgagggtaagctccgctattt

SEQ ID NO: 61493 - DNA, 22 bp, synthetic construct
  misc_feature 1..22: note = chemically synthesized
  source 1..22: mol_type = other DNA
agggtaagctccgctatttcac

SEQ ID NO: 61494 - DNA, 22 bp, synthetic construct
  misc_feature 1..22: note = chemically synthesized
  source 1..22: mol_type = other DNA
cgctatttcacacctgaactcc

SEQ ID NO: 61495 - DNA, 22 bp, synthetic construct
  misc_feature 1..22: note = chemically synthesized
  source 1..22: mol_type = other DNA
tttcacacctgaactccggagt

SEQ ID NO: 61496 - DNA, 22 bp, synthetic construct
  misc_feature 1..22: note = chemically synthesized
  source 1..22: mol_type = other DNA
cacacctgaactccggagtctg

SEQ ID NO: 61497 - DNA, 22 bp, synthetic construct
  misc_feature 1..22: note = chemically synthesized
  source 1..22: mol_type = other DNA
acacctgaactccggagtctgt

SEQ ID NO: 61498 - DNA, 22 bp, synthetic construct
  misc_feature 1..22: note = chemically synthesized
  source 1..22: mol_type = other DNA
aactccggagtctgtatattca

SEQ ID NO: 61499 - DNA, 22 bp, synthetic construct
  misc_feature 1..22: note = chemically synthesized
  source 1..22: mol_type = other DNA
cggagtctgtatattcagggaa

SEQ ID NO: 61500 - DNA, 22 bp, synthetic construct
  misc_feature 1..22: note = chemically synthesized
  source 1..22: mol_type = other DNA
tatattcagggaagattgcatt

SEQ ID NO: 61501 - DNA, 22 bp, synthetic construct
  misc_feature 1..22: note = chemically synthesized
  source 1..22: mol_type = other DNA
agggaagattgcattctcctac

SEQ ID NO: 61502 - DNA, 22 bp, synthetic construct
  misc_feature 1..22: note = chemically synthesized
  source 1..22: mol_type = other DNA
cattctcctactggatttgggc

SEQ ID NO: 61503 - DNA, 22 bp, synthetic construct
  misc_feature 1..22: note = chemically synthesized
  source 1..22: mol_type = other DNA
tcctactggatttgggctctca

SEQ ID NO: 61504 - DNA, 22 bp, synthetic construct
  misc_feature 1..22: note = chemically synthesized
  source 1..22: mol_type = other DNA
ctactggatttgggctctcaga

SEQ ID NO: 61505 - DNA, 22 bp, synthetic construct
  misc_feature 1..22: note = chemically synthesized
  source 1..22: mol_type = other DNA
ctggatttgggctctcagaggg

SEQ ID NO: 61506 - DNA, 22 bp, synthetic construct
  misc_feature 1..22: note = chemically synthesized
  source 1..22: mol_type = other DNA
gatttgggctctcagagggcgt

SEQ ID NO: 61507 - DNA, 22 bp, synthetic construct
  misc_feature 1..22: note = chemically synthesized
  source 1..22: mol_type = other DNA
gggctctcagagggcgttgtgg

SEQ ID NO: 61508 - DNA, 22 bp, synthetic construct
  misc_feature 1..22: note = chemically synthesized
  source 1..22: mol_type = other DNA
ggctctcagagggcgttgtggg

SEQ ID NO: 61509 - DNA, 22 bp, synthetic construct
  misc_feature 1..22: note = chemically synthesized
  source 1..22: mol_type = other DNA
tcagagggcgttgtgggaacca

SEQ ID NO: 61510 - DNA, 22 bp, synthetic construct
  misc_feature 1..22: note = chemically synthesized
  source 1..22: mol_type = other DNA
agagggcgttgtgggaaccagg

SEQ ID NO: 61511 - DNA, 22 bp, synthetic construct
  misc_feature 1..22: note = chemically synthesized
  source 1..22: mol_type = other DNA
tgggaaccaggcccctcacaga

SEQ ID NO: 61512 - DNA, 22 bp, synthetic construct
  misc_feature 1..22: note = chemically synthesized
  source 1..22: mol_type = other DNA
acagaatcaaatggtcccaacc

SEQ ID NO: 61513 - DNA, 22 bp, synthetic construct
  misc_feature 1..22: note = chemically synthesized
  source 1..22: mol_type = other DNA
ttttttttttttaatagagatg

SEQ ID NO: 61514 - DNA, 22 bp, synthetic construct
  misc_feature 1..22: note = chemically synthesized
  source 1..22: mol_type = other DNA
tttttttttttaatagagatgg

SEQ ID NO: 61515 - DNA, 22 bp, synthetic construct
  misc_feature 1..22: note = chemically synthesized
  source 1..22: mol_type = other DNA
ttttttttttaatagagatggg

SEQ ID NO: 61516 - DNA, 22 bp, synthetic construct
  misc_feature 1..22: note = chemically synthesized
  source 1..22: mol_type = other DNA
tttttttttaatagagatgggg

SEQ ID NO: 61517 - DNA, 22 bp, synthetic construct
  misc_feature 1..22: note = chemically synthesized
  source 1..22: mol_type = other DNA
ttttttttaatagagatggggg

SEQ ID NO: 61518 - DNA, 22 bp, synthetic construct
  misc_feature 1..22: note = chemically synthesized
  source 1..22: mol_type = other DNA
tttttttaatagagatgggggt

SEQ ID NO: 61519 - DNA, 22 bp, synthetic construct
  misc_feature 1..22: note = chemically synthesized
  source 1..22: mol_type = other DNA
ttttttaatagagatgggggtc

SEQ ID NO: 61520 - DNA, 22 bp, synthetic construct
  misc_feature 1..22: note = chemically synthesized
  source 1..22: mol_type = other DNA
tttttaatagagatgggggtct

SEQ ID NO: 61521 - DNA, 22 bp, synthetic construct
  misc_feature 1..22: note = chemically synthesized
  source 1..22: mol_type = other DNA
ttttaatagagatgggggtctc

SEQ ID NO: 61522 - DNA, 22 bp, synthetic construct
  misc_feature 1..22: note = chemically synthesized
  source 1..22: mol_type = other DNA
tttaatagagatgggggtctca

SEQ ID NO: 61523 - DNA, 22 bp, synthetic construct
  misc_feature 1..22: note = chemically synthesized
  source 1..22: mol_type = other DNA
ttaatagagatgggggtctcac

SEQ ID NO: 61524 - DNA, 22 bp, synthetic construct
  misc_feature 1..22: note = chemically synthesized
  source 1..22: mol_type = other DNA
taatagagatgggggtctcact

SEQ ID NO: 61525 - DNA, 22 bp, synthetic construct
  misc_feature 1..22: note = chemically synthesized
  source 1..22: mol_type = other DNA
aatagagatgggggtctcacta

SEQ ID NO: 61526 - DNA, 22 bp, synthetic construct
  misc_feature 1..22: note = chemically synthesized
  source 1..22: mol_type = other DNA
atagagatgggggtctcactat

SEQ ID NO: 61527 - DNA, 22 bp, synthetic construct
  misc_feature 1..22: note = chemically synthesized
  source 1..22: mol_type = other DNA
actatgctgcccaggctggtct

SEQ ID NO: 61528 - DNA, 22 bp, synthetic construct
  misc_feature 1..22: note = chemically synthesized
  source 1..22: mol_type = other DNA
tgctgcccaggctggtcttgaa

SEQ ID NO: 61529 - DNA, 22 bp, synthetic construct
  misc_feature 1..22: note = chemically synthesized
  source 1..22: mol_type = other DNA
cccaggctggtcttgaactcct

SEQ ID NO: 61530 - DNA, 22 bp, synthetic construct
  misc_feature 1..22: note = chemically synthesized
  source 1..22: mol_type = other DNA
gtcttgaactcctgggttcaag

SEQ ID NO: 61531 - DNA, 22 bp, synthetic construct
  misc_feature 1..22: note = chemically synthesized
  source 1..22: mol_type = other DNA
gaactcctgggttcaagtgatc

SEQ ID NO: 61532 - DNA, 22 bp, synthetic construct
  misc_feature 1..22: note = chemically synthesized
  source 1..22: mol_type = other DNA
aactcctgggttcaagtgatcc

SEQ ID NO: 61533 - DNA, 22 bp, synthetic construct
  misc_feature 1..22: note = chemically synthesized
  source 1..22: mol_type = other DNA
ctgggttcaagtgatcctcctg

SEQ ID NO: 61534 - DNA, 22 bp, synthetic construct
  misc_feature 1..22: note = chemically synthesized
  source 1..22: mol_type = other DNA
ggttcaagtgatcctcctgcct

SEQ ID NO: 61535 - DNA, 22 bp, synthetic construct
  misc_feature 1..22: note = chemically synthesized
  source 1..22: mol_type = other DNA
aagtgatcctcctgcctcagcc

SEQ ID NO: 61536 - DNA, 22 bp, synthetic construct
  misc_feature 1..22: note = chemically synthesized
  source 1..22: mol_type = other DNA
ctgcctcagcctcccaaagtgc

SEQ ID NO: 61537 - DNA, 22 bp, synthetic construct
  misc_feature 1..22: note = chemically synthesized
  source 1..22: mol_type = other DNA
cctcagcctcccaaagtgctgg

SEQ ID NO: 61538 - DNA, 22 bp, synthetic construct
  misc_feature 1..22: note = chemically synthesized
  source 1..22: mol_type = other DNA
agcctcccaaagtgctgggatt

SEQ ID NO: 61539 - DNA, 22 bp, synthetic construct
  misc_feature 1..22: note = chemically synthesized
  source 1..22: mol_type = other DNA
ccaaagtgctgggattacagtg

SEQ ID NO: 61540 - DNA, 22 bp, synthetic construct
  misc_feature 1..22: note = chemically synthesized
  source 1..22: mol_type = other DNA
ggattacagtgtgagccactgc

SEQ ID NO: 61541 - DNA, 22 bp, synthetic construct
  misc_feature 1..22: note = chemically synthesized
  source 1..22: mol_type = other DNA
cagtgtgagccactgcgcttgg

SEQ ID NO: 61542 - DNA, 22 bp, synthetic construct
  misc_feature 1..22: note = chemically synthesized
  source 1..22: mol_type = other DNA
cgcttggccagaaatggttttg

SEQ ID NO: 61543 - DNA, 22 bp, synthetic construct
  misc_feature 1..22: note = chemically synthesized
  source 1..22: mol_type = other DNA
ggccagaaatggttttgatctg

SEQ ID NO: 61544 - DNA, 22 bp, synthetic construct
  misc_feature 1..22: note = chemically synthesized
  source 1..22: mol_type = other DNA
gccagaaatggttttgatctgt

SEQ ID NO: 61545 - DNA, 22 bp, synthetic construct
  misc_feature 1..22: note = chemically synthesized
  source 1..22: mol_type = other DNA
tgatctgtctgaactgaaccct

SEQ ID NO: 61546 - DNA, 22 bp, synthetic construct
  misc_feature 1..22: note = chemically synthesized
  source 1..22: mol_type = other DNA
gatctgtctgaactgaacccta

SEQ ID NO: 61547 - DNA, 22 bp, synthetic construct
  misc_feature 1..22: note = chemically synthesized
  source 1..22: mol_type = other DNA
atctgtctgaactgaaccctac

SEQ ID NO: 61548 - DNA, 22 bp, synthetic construct
  misc_feature 1..22: note = chemically synthesized
  source 1..22: mol_type = other DNA
tctgaactgaaccctactgctt

SEQ ID NO: 61549 - DNA, 22 bp, synthetic construct
  misc_feature 1..22: note = chemically synthesized
  source 1..22: mol_type = other DNA
aactgaaccctactgcttaggc

SEQ ID NO: 61550 - DNA, 22 bp, synthetic construct
  misc_feature 1..22: note = chemically synthesized
  source 1..22: mol_type = other DNA
aaccctactgcttaggcatagc

SEQ ID NO: 61551 - DNA, 22 bp, synthetic construct
  misc_feature 1..22: note = chemically synthesized
  source 1..22: mol_type = other DNA
ctgcttaggcatagccccatcc

SEQ ID NO: 61552 - DNA, 22 bp, synthetic construct
  misc_feature 1..22: note = chemically synthesized
  source 1..22: mol_type = other DNA
cttaggcatagccccatccttg

SEQ ID NO: 61553 - DNA, 22 bp, synthetic construct
  misc_feature 1..22: note = chemically synthesized
  source 1..22: mol_type = other DNA
aggcatagccccatccttgata

SEQ ID NO: 61554 - DNA, 22 bp, synthetic construct
  misc_feature 1..22: note = chemically synthesized
  source 1..22: mol_type = other DNA
ggcatagccccatccttgataa

SEQ ID NO: 61555 - DNA, 22 bp, synthetic construct
  misc_feature 1..22: note = chemically synthesized
  source 1..22: mol_type = other DNA
gataatctatttgctcccaagg

SEQ ID NO: 61556 - DNA, 22 bp, synthetic construct
  misc_feature 1..22: note = chemically synthesized
  source 1..22: mol_type = other DNA
ataatctatttgctcccaagga

SEQ ID NO: 61557 - DNA, 22 bp, synthetic construct
  misc_feature 1..22: note = chemically synthesized
  source 1..22: mol_type = other DNA
tttgctcccaaggaccaagtcc

SEQ ID NO: 61558 - DNA, 22 bp, synthetic construct
  misc_feature 1..22: note = chemically synthesized
  source 1..22: mol_type = other DNA
gctcccaaggaccaagtccaag

SEQ ID NO: 61559 - DNA, 22 bp, synthetic construct
  misc_feature 1..22: note = chemically synthesized
  source 1..22: mol_type = other DNA
ctcccaaggaccaagtccaaga

SEQ ID NO: 61560 - DNA, 22 bp, synthetic construct
  misc_feature 1..22: note = chemically synthesized
  source 1..22: mol_type = other DNA
ccaaggaccaagtccaagatcc

SEQ ID NO: 61561 - DNA, 22 bp, synthetic construct
  misc_feature 1..22: note = chemically synthesized
  source 1..22: mol_type = other DNA
acaagaaaggtctgccagaaag

SEQ ID NO: 61562 - DNA, 22 bp, synthetic construct
  misc_feature 1..22: note = chemically synthesized
  source 1..22: mol_type = other DNA
caagaaaggtctgccagaaagt

SEQ ID NO: 61563 - DNA, 22 bp, synthetic construct
  misc_feature 1..22: note = chemically synthesized
  source 1..22: mol_type = other DNA
ccagaaagtaaatactgccccc

SEQ ID NO: 61564 - DNA, 22 bp, synthetic construct
  misc_feature 1..22: note = chemically synthesized
  source 1..22: mol_type = other DNA
cccccactccctgaagtttatg

SEQ ID NO: 61565 - DNA, 22 bp, synthetic construct
  misc_feature 1..22: note = chemically synthesized
  source 1..22: mol_type = other DNA
cctgaagtttatgaggttgata

SEQ ID NO: 61566 - DNA, 22 bp, synthetic construct
  misc_feature 1..22: note = chemically synthesized
  source 1..22: mol_type = other DNA
aagtttatgaggttgataagaa

SEQ ID NO: 61567 - DNA, 22 bp, synthetic construct
  misc_feature 1..22: note = chemically synthesized
  source 1..22: mol_type = other DNA
atgaggttgataagaaaacata

SEQ ID NO: 61568 - DNA, 22 bp, synthetic construct
  misc_feature 1..22: note = chemically synthesized
  source 1..22: mol_type = other DNA
tgaggttgataagaaaacataa

SEQ ID NO: 61569 - DNA, 22 bp, synthetic construct
  misc_feature 1..22: note = chemically synthesized
  source 1..22: mol_type = other DNA
ataagaaaacataacagataaa

SEQ ID NO: 61570 - DNA, 22 bp, synthetic construct
  misc_feature 1..22: note = chemically synthesized
  source 1..22: mol_type = other DNA
attgagtgctaactttatgcca

SEQ ID NO: 61571 - DNA, 22 bp, synthetic construct
  misc_feature 1..22: note = chemically synthesized
  source 1..22: mol_type = other DNA
ttgagtgctaactttatgccag

SEQ ID NO: 61572 - DNA, 22 bp, synthetic construct
  misc_feature 1..22: note = chemically synthesized
  source 1..22: mol_type = other DNA
agtgctaactttatgccagatt

SEQ ID NO: 61573 - DNA, 22 bp, synthetic construct
  misc_feature 1..22: note = chemically synthesized
  source 1..22: mol_type = other DNA
actttatgccagattctgttct

SEQ ID NO: 61574 - DNA, 22 bp, synthetic construct
  misc_feature 1..22: note = chemically synthesized
  source 1..22: mol_type = other DNA
tatgccagattctgttctatgt

SEQ ID NO: 61575 - DNA, 22 bp, synthetic construct
  misc_feature 1..22: note = chemically synthesized
  source 1..22: mol_type = other DNA
atgccagattctgttctatgta

SEQ ID NO: 61576 - DNA, 22 bp, synthetic construct
  misc_feature 1..22: note = chemically synthesized
  source 1..22: mol_type = other DNA
tgccagattctgttctatgtac

SEQ ID NO: 61577 - DNA, 22 bp, synthetic construct
  misc_feature 1..22: note = chemically synthesized
  source 1..22: mol_type = other DNA
tgttctatgtactttatttata

SEQ ID NO: 61578 - DNA, 22 bp, synthetic construct
  misc_feature 1..22: note = chemically synthesized
  source 1..22: mol_type = other DNA
ttctatgtactttatttataca

SEQ ID NO: 61579 - DNA, 22 bp, synthetic construct
  misc_feature 1..22: note = chemically synthesized
  source 1..22: mol_type = other DNA
tatgtactttatttatacaatt

SEQ ID NO: 61580 - DNA, 22 bp, synthetic construct
  misc_feature 1..22: note = chemically synthesized
  source 1..22: mol_type = other DNA
tgtactttatttatacaattaa

SEQ ID NO: 61581 - DNA, 22 bp, synthetic construct
  misc_feature 1..22: note = chemically synthesized
  source 1..22: mol_type = other DNA
tatttatacaattaactcgctt

SEQ ID NO: 61582 - DNA, 22 bp, synthetic construct
  misc_feature 1..22: note = chemically synthesized
  source 1..22: mol_type = other DNA
atttatacaattaactcgctta

SEQ ID NO: 61583 - DNA, 22 bp, synthetic construct
  misc_feature 1..22: note = chemically synthesized
  source 1..22: mol_type = other DNA
tttatacaattaactcgcttag

SEQ ID NO: 61584 - DNA, 22 bp, synthetic construct
  misc_feature 1..22: note = chemically synthesized
  source 1..22: mol_type = other DNA
atacaattaactcgcttagttc

SEQ ID NO: 61585 - DNA, 22 bp, synthetic construct
  misc_feature 1..22: note = chemically synthesized
  source 1..22: mol_type = other DNA
tacaattaactcgcttagttct

SEQ ID NO: 61586 - DNA, 22 bp, synthetic construct
  misc_feature 1..22: note = chemically synthesized
  source 1..22: mol_type = other DNA
actcgcttagttctcccaacat

SEQ ID NO: 61587 - DNA, 22 bp, synthetic construct
  misc_feature 1..22: note = chemically synthesized
  source 1..22: mol_type = other DNA
gcttagttctcccaacatctct

SEQ ID NO: 61588 - DNA, 22 bp, synthetic construct
  misc_feature 1..22: note = chemically synthesized
  source 1..22: mol_type = other DNA
agttctcccaacatctctgtga

SEQ ID NO: 61589 - DNA, 22 bp, synthetic construct
  misc_feature 1..22: note = chemically synthesized
  source 1..22: mol_type = other DNA
gttctcccaacatctctgtgag

SEQ ID NO: 61590 - DNA, 22 bp, synthetic construct
  misc_feature 1..22: note = chemically synthesized
  source 1..22: mol_type = other DNA
tcccaacatctctgtgagttgg

SEQ ID NO: 61591 - DNA, 22 bp, synthetic construct
  misc_feature 1..22: note = chemically synthesized
  source 1..22: mol_type = other DNA
ccaacatctctgtgagttggct

SEQ ID NO: 61592 - DNA, 22 bp, synthetic construct
  misc_feature 1..22: note = chemically synthesized
  source 1..22: mol_type = other DNA
tgtgagttggctactgtcattt

SEQ ID NO: 61593 - DNA, 22 bp, synthetic construct
  misc_feature 1..22: note = chemically synthesized
  source 1..22: mol_type = other DNA
tgagttggctactgtcatttat

SEQ ID NO: 61594 - DNA, 22 bp, synthetic construct
  misc_feature 1..22: note = chemically synthesized
  source 1..22: mol_type = other DNA
gctactgtcatttatccttata

SEQ ID NO: 61595 - DNA, 22 bp, synthetic construct
  misc_feature 1..22: note = chemically synthesized
  source 1..22: mol_type = other DNA
ctgtcatttatccttatattac

SEQ ID NO: 61596 - DNA, 22 bp, synthetic construct
  misc_feature 1..22: note = chemically synthesized
  source 1..22: mol_type = other DNA
tcatttatccttatattacaaa

SEQ ID NO: 61597 - DNA, 22 bp, synthetic construct
  misc_feature 1..22: note = chemically synthesized
  source 1..22: mol_type = other DNA
atccttatattacaaataggtc

SEQ ID NO: 61598 - DNA, 22 bp, synthetic construct
  misc_feature 1..22: note = chemically synthesized
  source 1..22: mol_type = other DNA
tccttatattacaaataggtcc

SEQ ID NO: 61599 - DNA, 22 bp, synthetic construct
  misc_feature 1..22: note = chemically synthesized
  source 1..22: mol_type = other DNA
atattacaaataggtccagagg

SEQ ID NO: 61600 - DNA, 22 bp, synthetic construct
  misc_feature 1..22: note = chemically synthesized
  source 1..22: mol_type = other DNA
tattacaaataggtccagaggg

SEQ ID NO: 61601 - DNA, 22 bp, synthetic construct
  misc_feature 1..22: note = chemically synthesized
  source 1..22: mol_type = other DNA
caaataggtccagaggggttag

SEQ ID NO: 61602 - DNA, 22 bp, synthetic construct
  misc_feature 1..22: note = chemically synthesized
  source 1..22: mol_type = other DNA
gtcatcttgtccagaatggtgg

SEQ ID NO: 61603 - DNA, 22 bp, synthetic construct
  misc_feature 1..22: note = chemically synthesized
  source 1..22: mol_type = other DNA
gtccagaatggtggaaccaggt

SEQ ID NO: 61604 - DNA, 22 bp, synthetic construct
  misc_feature 1..22: note = chemically synthesized
  source 1..22: mol_type = other DNA
tccagaatggtggaaccaggtt

SEQ ID NO: 61605 - DNA, 22 bp, synthetic construct
  misc_feature 1..22: note = chemically synthesized
  source 1..22: mol_type = other DNA
aggatcaggcagtctgggctgg

SEQ ID NO: 61606 - DNA, 22 bp, synthetic construct
  misc_feature 1..22: note = chemically synthesized
  source 1..22: mol_type = other DNA
ggctgggcatggtggctcacat

SEQ ID NO: 61607 - DNA, 22 bp, synthetic construct
  misc_feature 1..22: note = chemically synthesized
  source 1..22: mol_type = other DNA
ggcatggtggctcacatctgta

SEQ ID NO: 61608 - DNA, 22 bp, synthetic construct
  misc_feature 1..22: note = chemically synthesized
  source 1..22: mol_type = other DNA
acatctgtaatcccagcacttt

SEQ ID NO: 61609 - DNA, 22 bp, synthetic construct
  misc_feature 1..22: note = chemically synthesized
  source 1..22: mol_type = other DNA
taatcccagcactttgggaggc

SEQ ID NO: 61610 - DNA, 22 bp, synthetic construct
  misc_feature 1..22: note = chemically synthesized
  source 1..22: mol_type = other DNA
tgggaggctgaggtggcagatt

SEQ ID NO: 61611 - DNA, 22 bp, synthetic construct
  misc_feature 1..22: note = chemically synthesized
  source 1..22: mol_type = other DNA
gggaggctgaggtggcagattg

SEQ ID NO: 61612 - DNA, 22 bp, synthetic construct
  misc_feature 1..22: note = chemically synthesized
  source 1..22: mol_type = other DNA
ggaggctgaggtggcagattgc

SEQ ID NO: 61613 - DNA, 22 bp, synthetic construct
  misc_feature 1..22: note = chemically synthesized
  source 1..22: mol_type = other DNA
aggtggcagattgcctgagctc

SEQ ID NO: 61614 - DNA, 22 bp, synthetic construct
  misc_feature 1..22: note = chemically synthesized
  source 1..22: mol_type = other DNA
cctgagctcaggagttcgagac

SEQ ID NO: 61615 - DNA, 22 bp, synthetic construct
  misc_feature 1..22: note = chemically synthesized
  source 1..22: mol_type = other DNA
agctcaggagttcgagaccagc

SEQ ID NO: 61616 - DNA, 22 bp, synthetic construct
  misc_feature 1..22: note = chemically synthesized
  source 1..22: mol_type = other DNA
aggagttcgagaccagcctggg

SEQ ID NO: 61617 - DNA, 22 bp, synthetic construct
  misc_feature 1..22: note = chemically synthesized
  source 1..22: mol_type = other DNA
gagaccagcctgggcaacatgg

SEQ ID NO: 61618 - DNA, 22 bp, synthetic construct
  misc_feature 1..22: note = chemically synthesized
  source 1..22: mol_type = other DNA
ggcaacatggtgagacccccgt

SEQ ID NO: 61619 - DNA, 22 bp, synthetic construct
  misc_feature 1..22: note = chemically synthesized
  source 1..22: mol_type = other DNA
taccaaaaatacaaaacattag

SEQ ID NO: 61620 - DNA, 22 bp, synthetic construct
  misc_feature 1..22: note = chemically synthesized
  source 1..22: mol_type = other DNA
gccaagcgtggtggtgcatgcc

SEQ ID NO: 61621 - DNA, 22 bp, synthetic construct
  misc_feature 1..22: note = chemically synthesized
  source 1..22: mol_type = other DNA
tggtcctaactactcaggtggc

SEQ ID NO: 61622 - DNA, 22 bp, synthetic construct
  misc_feature 1..22: note = chemically synthesized
  source 1..22: mol_type = other DNA
actactcaggtggctgaggtgg

SEQ ID NO: 61623 - DNA, 22 bp, synthetic construct
  misc_feature 1..22: note = chemically synthesized
  source 1..22: mol_type = other DNA
ctcaggtggctgaggtgggaga

SEQ ID NO: 61624 - DNA, 22 bp, synthetic construct
  misc_feature 1..22: note = chemically synthesized
  source 1..22: mol_type = other DNA
aggtggctgaggtgggagaatc

SEQ ID NO: 61625 - DNA, 22 bp, synthetic construct
  misc_feature 1..22: note = chemically synthesized
  source 1..22: mol_type = other DNA
aggtgggagaatcccttgagct

SEQ ID NO: 61626 - DNA, 22 bp, synthetic construct
  misc_feature 1..22: note = chemically synthesized
  source 1..22: mol_type = other DNA
gagctcagaggttgcagtgagc

SEQ ID NO: 61627 - DNA, 22 bp, synthetic construct
  misc_feature 1..22: note = chemically synthesized
  source 1..22: mol_type = other DNA
agctcagaggttgcagtgagcc

SEQ ID NO: 61628 - DNA, 22 bp, synthetic construct
  misc_feature 1..22: note = chemically synthesized
  source 1..22: mol_type = other DNA
agaggttgcagtgagccaagat

SEQ ID NO: 61629 - DNA, 22 bp, synthetic construct
  misc_feature 1..22: note = chemically synthesized
  source 1..22: mol_type = other DNA
cagtgagccaagattatgccac

SEQ ID NO: 61630 - DNA, 22 bp, synthetic construct
  misc_feature 1..22: note = chemically synthesized
  source 1..22: mol_type = other DNA
tgccactgcactccagcctggg

SEQ ID NO: 61631 - DNA, 22 bp, synthetic construct
  misc_feature 1..22: note = chemically synthesized
  source 1..22: mol_type = other DNA
cactccagcctgggtgacagag

SEQ ID NO: 61632 - DNA, 22 bp, synthetic construct
  misc_feature 1..22: note = chemically synthesized
  source 1..22: mol_type = other DNA
cagcctgggtgacagagtgaga

SEQ ID NO: 61633 - DNA, 22 bp, synthetic construct
  misc_feature 1..22: note = chemically synthesized
  source 1..22: mol_type = other DNA
ggtgacagagtgagaccctgtc

SEQ ID NO: 61634 - DNA, 22 bp, synthetic construct
  misc_feature 1..22: note = chemically synthesized
  source 1..22: mol_type = other DNA
tctcagaaaaaaaaaaaaaaaa

SEQ ID NO: 61635 - DNA, 22 bp, synthetic construct
  misc_feature 1..22: note = chemically synthesized
  source 1..22: mol_type = other DNA
agaaaaaaaaaaaaaaaagaag

SEQ ID NO: 61636 - DNA, 22 bp, synthetic construct
  misc_feature 1..22: note = chemically synthesized
  source 1..22: mol_type = other DNA
ggctgggtgctgtggctcgcgc

SEQ ID NO: 61637 - DNA, 22 bp, synthetic construct
  misc_feature 1..22: note = chemically synthesized
  source 1..22: mol_type = other DNA
ggtgctgtggctcgcgcctgta

SEQ ID NO: 61638 - DNA, 22 bp, synthetic construct
  misc_feature 1..22: note = chemically synthesized
  source 1..22: mol_type = other DNA
tggctcgcgcctgtaatcccag

SEQ ID NO: 61639 - DNA, 22 bp, synthetic construct
  misc_feature 1..22: note = chemically synthesized
  source 1..22: mol_type = other DNA
gcgcctgtaatcccagatacaa

SEQ ID NO: 61640 - DNA, 22 bp, synthetic construct
  misc_feature 1..22: note = chemically synthesized
  source 1..22: mol_type = other DNA
taatcccagatacaaaataatc

SEQ ID NO: 61641 - DNA, 22 bp, synthetic construct
  misc_feature 1..22: note = chemically synthesized
  source 1..22: mol_type = other DNA
tgtaatatatcctgcttattag

SEQ ID NO: 61642 - DNA, 22 bp, synthetic construct
  misc_feature 1..22: note = chemically synthesized
  source 1..22: mol_type = other DNA
gtaatatatcctgcttattaga

SEQ ID NO: 61643 - DNA, 22 bp, synthetic construct
  misc_feature 1..22: note = chemically synthesized
  source 1..22: mol_type = other DNA
taatatatcctgcttattagac

SEQ ID NO: 61644 - DNA, 22 bp, synthetic construct
  misc_feature 1..22: note = chemically synthesized
  source 1..22: mol_type = other DNA
cttattagacagaacattttga

SEQ ID NO: 61645 - DNA, 22 bp, synthetic construct
  misc_feature 1..22: note = chemically synthesized
  source 1..22: mol_type = other DNA
attagacagaacattttgatca

SEQ ID NO: 61646 - DNA, 22 bp, synthetic construct
  misc_feature 1..22: note = chemically synthesized
  source 1..22: mol_type = other DNA
ttagacagaacattttgatcac

SEQ ID NO: 61647 - DNA, 22 bp, synthetic construct
  misc_feature 1..22: note = chemically synthesized
  source 1..22: mol_type = other DNA
gacagaacattttgatcactca

SEQ ID NO: 61648 - DNA, 22 bp, synthetic construct
  misc_feature 1..22: note = chemically synthesized
  source 1..22: mol_type = other DNA
tgatcactcatctgttccctaa

SEQ ID NO: 61649 - DNA, 22 bp, synthetic construct
  misc_feature 1..22: note = chemically synthesized
  source 1..22: mol_type = other DNA
gatcactcatctgttccctaag

SEQ ID NO: 61650 - DNA, 22 bp, synthetic construct
  misc_feature 1..22: note = chemically synthesized
  source 1..22: mol_type = other DNA
atcactcatctgttccctaagt

SEQ ID NO: 61651 - DNA, 22 bp, synthetic construct
  misc_feature 1..22: note = chemically synthesized
  source 1..22: mol_type = other DNA
atctgttccctaagttatagat

SEQ ID NO: 61652 - DNA, 22 bp, synthetic construct
  misc_feature 1..22: note = chemically synthesized
  source 1..22: mol_type = other DNA
ttccctaagttatagatttacg

SEQ ID NO: 61653 - DNA, 22 bp, synthetic construct
  misc_feature 1..22: note = chemically synthesized
  source 1..22: mol_type = other DNA
cctaagttatagatttacgtcc

SEQ ID NO: 61654 - DNA, 22 bp, synthetic construct
  misc_feature 1..22: note = chemically synthesized
  source 1..22: mol_type = other DNA
agttatagatttacgtccactt

SEQ ID NO: 61655 - DNA, 22 bp, synthetic construct
  misc_feature 1..22: note = chemically synthesized
  source 1..22: mol_type = other DNA
tagatttacgtccactttagaa

SEQ ID NO: 61656 - DNA, 22 bp, synthetic construct
  misc_feature 1..22: note = chemically synthesized
  source 1..22: mol_type = other DNA
acgtccactttagaaatggctt

SEQ ID NO: 61657 - DNA, 22 bp, synthetic construct
  misc_feature 1..22: note = chemically synthesized
  source 1..22: mol_type = other DNA
cgtccactttagaaatggcttg

SEQ ID NO: 61658 - DNA, 22 bp, synthetic construct
  misc_feature 1..22: note = chemically synthesized
  source 1..22: mol_type = other DNA
tagaaatggcttgtgaggcaag

SEQ ID NO: 61659 - DNA, 22 bp, synthetic construct
  misc_feature 1..22: note = chemically synthesized
  source 1..22: mol_type = other DNA
agaaatggcttgtgaggcaagt

SEQ ID NO: 61660 - DNA, 22 bp, synthetic construct
  misc_feature 1..22: note = chemically synthesized
  source 1..22: mol_type = other DNA
gaaatggcttgtgaggcaagtt

SEQ ID NO: 61661 - DNA, 22 bp, synthetic construct
  misc_feature 1..22: note = chemically synthesized
  source 1..22: mol_type = other DNA
gtgaggcaagtttaagtgaccg

SEQ ID NO: 61662 - DNA, 22 bp, synthetic construct
  misc_feature 1..22: note = chemically synthesized
  source 1..22: mol_type = other DNA
tgaggcaagtttaagtgaccga

SEQ ID NO: 61663 - DNA, 22 bp, synthetic construct
  misc_feature 1..22: note = chemically synthesized
  source 1..22: mol_type = other DNA
aagtgaccgatgacagttttaa

SEQ ID NO: 61664 - DNA, 22 bp, synthetic construct
  misc_feature 1..22: note = chemically synthesized
  source 1..22: mol_type = other DNA
agtgaccgatgacagttttaaa

SEQ ID NO: 61665 - DNA, 22 bp, synthetic construct
  misc_feature 1..22: note = chemically synthesized
  source 1..22: mol_type = other DNA
taaagcaaggtccatgtcatgt

SEQ ID NO: 61666 - DNA, 22 bp, synthetic construct
  misc_feature 1..22: note = chemically synthesized
  source 1..22: mol_type = other DNA
aaagcaaggtccatgtcatgtt

SEQ ID NO: 61667 - DNA, 22 bp, synthetic construct
  misc_feature 1..22: note = chemically synthesized
  source 1..22: mol_type = other DNA
aagcaaggtccatgtcatgtta

SEQ ID NO: 61668 - DNA, 22 bp, synthetic construct
  misc_feature 1..22: note = chemically synthesized
  source 1..22: mol_type = other DNA
tggcataatttggtagaatgtt

SEQ ID NO: 61669 - DNA, 22 bp, synthetic construct
  misc_feature 1..22: note = chemically synthesized
  source 1..22: mol_type = other DNA
ggtagaatgttctagtagtgta

SEQ ID NO: 61670 - DNA, 22 bp, synthetic construct
  misc_feature 1..22: note = chemically synthesized
  source 1..22: mol_type = other DNA
gtagaatgttctagtagtgtat

SEQ ID NO: 61671 - DNA, 22 bp, synthetic construct
  misc_feature 1..22: note = chemically synthesized
  source 1..22: mol_type = other DNA
tagtagtgtatcagttttcagg

SEQ ID NO: 61672 - DNA, 22 bp, synthetic construct
  misc_feature 1..22: note = chemically synthesized
  source 1..22: mol_type = other DNA
gtagtgtatcagttttcaggtg

SEQ ID NO: 61673 - DNA, 22 bp, synthetic construct
  misc_feature 1..22: note = chemically synthesized
  source 1..22: mol_type = other DNA
tcaggtggtaggcttgaggatg

SEQ ID NO: 61674 - DNA, 22 bp, synthetic construct
  misc_feature 1..22: note = chemically synthesized
  source 1..22: mol_type = other DNA
caggtggtaggcttgaggatga

SEQ ID NO: 61675 - DNA, 22 bp, synthetic construct
  misc_feature 1..22: note = chemically synthesized
  source 1..22: mol_type = other DNA
aggtggtaggcttgaggatgat

SEQ ID NO: 61676 - DNA, 22 bp, synthetic construct
  misc_feature 1..22: note = chemically synthesized
  source 1..22: mol_type = other DNA
gaggatgatacacacacacaca

SEQ ID NO: 61677 - DNA, 22 bp, synthetic construct
  misc_feature 1..22: note = chemically synthesized
  source 1..22: mol_type = other DNA
aggatgatacacacacacacac

SEQ ID NO: 61678 - DNA, 22 bp, synthetic construct
  misc_feature 1..22: note = chemically synthesized
  source 1..22: mol_type = other DNA
tattattgcccaaagaaaatag

SEQ ID NO: 61679 - DNA, 22 bp, synthetic construct
  misc_feature 1..22: note = chemically synthesized
  source 1..22: mol_type = other DNA
ttattgcccaaagaaaatagac

SEQ ID NO: 61680 - DNA, 22 bp, synthetic construct
  misc_feature 1..22: note = chemically synthesized
  source 1..22: mol_type = other DNA
ttgcccaaagaaaatagaccca

SEQ ID NO: 61681 - DNA, 22 bp, synthetic construct
  misc_feature 1..22: note = chemically synthesized
  source 1..22: mol_type = other DNA
cccaaagaaaatagacccatta

SEQ ID NO: 61682 - DNA, 22 bp, synthetic construct
  misc_feature 1..22: note = chemically synthesized
  source 1..22: mol_type = other DNA
aggaagtccaacttctgctgcg

SEQ ID NO: 61683 - DNA, 22 bp, synthetic construct
  misc_feature 1..22: note = chemically synthesized
  source 1..22: mol_type = other DNA
ctgctgcgtggaccagtgctgc

SEQ ID NO: 61684 - DNA, 22 bp, synthetic construct
  misc_feature 1..22: note = chemically synthesized
  source 1..22: mol_type = other DNA
tgctgcgtggaccagtgctgcc

SEQ ID NO: 61685 - DNA, 22 bp, synthetic construct
  misc_feature 1..22: note = chemically synthesized
  source 1..22: mol_type = other DNA
ctgcgtggaccagtgctgccac

SEQ ID NO: 61686 - DNA, 22 bp, synthetic construct
  misc_feature 1..22: note = chemically synthesized
  source 1..22: mol_type = other DNA
cgtggaccagtgctgccacatc

SEQ ID NO: 61687 - DNA, 22 bp, synthetic construct
  misc_feature 1..22: note = chemically synthesized
  source 1..22: mol_type = other DNA
ccacatcacacatagaccaaag

SEQ ID NO: 61688 - DNA, 22 bp, synthetic construct
  misc_feature 1..22: note = chemically synthesized
  source 1..22: mol_type = other DNA
aggtttttgtggttttggttat

SEQ ID NO: 61689 - DNA, 22 bp, synthetic construct
  misc_feature 1..22: note = chemically synthesized
  source 1..22: mol_type = other DNA
ggtttttgtggttttggttatt

SEQ ID NO: 61690 - DNA, 22 bp, synthetic construct
  misc_feature 1..22: note = chemically synthesized
  source 1..22: mol_type = other DNA
ttgtggttttggttatttattt

SEQ ID NO: 61691 - DNA, 22 bp, synthetic construct
  misc_feature 1..22: note = chemically synthesized
  source 1..22: mol_type = other DNA
tgtggttttggttatttatttt

SEQ ID NO: 61692 - DNA, 22 bp, synthetic construct
  misc_feature 1..22: note = chemically synthesized
  source 1..22: mol_type = other DNA
gtggttttggttatttatttta

SEQ ID NO: 61693 - DNA, 22 bp, synthetic construct
  misc_feature 1..22: note = chemically synthesized
  source 1..22: mol_type = other DNA
tggttttggttatttattttat

SEQ ID NO: 61694 - DNA, 22 bp, synthetic construct
  misc_feature 1..22: note = chemically synthesized
  source 1..22: mol_type = other DNA
tggttatttattttatcttttt

SEQ ID NO: 61695 - DNA, 22 bp, synthetic construct
  misc_feature 1..22: note = chemically synthesized
  source 1..22: mol_type = other DNA
ggttatttattttatcttttta

SEQ ID NO: 61696 - DNA, 22 bp, synthetic construct
  misc_feature 1..22: note = chemically synthesized
  source 1..22: mol_type = other DNA
gttatttattttatctttttat

SEQ ID NO: 61697 - DNA, 22 bp, synthetic construct
  misc_feature 1..22: note = chemically synthesized
  source 1..22: mol_type = other DNA
tttattttatctttttatttta

SEQ ID NO: 61698 - DNA, 22 bp, synthetic construct
  misc_feature 1..22: note = chemically synthesized
  source 1..22: mol_type = other DNA
attttatctttttattttattt

SEQ ID NO: 61699 - DNA, 22 bp, synthetic construct
  misc_feature 1..22: note = chemically synthesized
  source 1..22: mol_type = other DNA
ttttatctttttattttatttt

SEQ ID NO: 61700 - DNA, 22 bp, synthetic construct
  misc_feature 1..22: note = chemically synthesized
  source 1..22: mol_type = other DNA
tatctttttattttattttatc

SEQ ID NO: 61701 - DNA, 22 bp, synthetic construct
  misc_feature 1..22: note = chemically synthesized
  source 1..22: mol_type = other DNA
atctttttattttattttatct

SEQ ID NO: 61702 - DNA, 22 bp, synthetic construct
  misc_feature 1..22: note = chemically synthesized
  source 1..22: mol_type = other DNA
tctttttattttattttatctt

SEQ ID NO: 61703 - DNA, 22 bp, synthetic construct
  misc_feature 1..22: note = chemically synthesized
  source 1..22: mol_type = other DNA
tttattttattttatcttattt

SEQ ID NO: 61704 - DNA, 22 bp, synthetic construct
  misc_feature 1..22: note = chemically synthesized
  source 1..22: mol_type = other DNA
ttattttattttatcttatttt

SEQ ID NO: 61705 - DNA, 22 bp, synthetic construct
  misc_feature 1..22: note = chemically synthesized
  source 1..22: mol_type = other DNA
tattttattttatcttatttta

SEQ ID NO: 61706 - DNA, 22 bp, synthetic construct
  misc_feature 1..22: note = chemically synthesized
  source 1..22: mol_type = other DNA
attttattttatcttattttat

SEQ ID NO: 61707 - DNA, 22 bp, synthetic construct
  misc_feature 1..22: note = chemically synthesized
  source 1..22: mol_type = other DNA
ttttattttatcttattttatt

SEQ ID NO: 61708 - DNA, 22 bp, synthetic construct
  misc_feature 1..22: note = chemically synthesized
  source 1..22: mol_type = other DNA
tattttatcttattttatttta

SEQ ID NO: 61709 - DNA, 22 bp, synthetic construct
  misc_feature 1..22: note = chemically synthesized
  source 1..22: mol_type = other DNA
attttatcttattttattttat

SEQ ID NO: 61710 - DNA, 22 bp, synthetic construct
  misc_feature 1..22: note = chemically synthesized
  source 1..22: mol_type = other DNA
ttttatcttattttattttatt

SEQ ID NO: 61711 - DNA, 22 bp, synthetic construct
  misc_feature 1..22: note = chemically synthesized
  source 1..22: mol_type = other DNA
tatcttattttattttatttta

SEQ ID NO: 61712 - DNA, 22 bp, synthetic construct
  misc_feature 1..22: note = chemically synthesized
  source 1..22: mol_type = other DNA
atcttattttattttattttat

SEQ ID NO: 61713 - DNA, 22 bp, synthetic construct
  misc_feature 1..22: note = chemically synthesized
  source 1..22: mol_type = other DNA
tcttattttattttattttatt

SEQ ID NO: 61714 - DNA, 22 bp, synthetic construct
  misc_feature 1..22: note = chemically synthesized
  source 1..22: mol_type = other DNA
attttattttattttattttat

SEQ ID NO: 61715 - DNA, 22 bp, synthetic construct
  misc_feature 1..22: note = chemically synthesized
  source 1..22: mol_type = other DNA
ttttattttattttattttatt

SEQ ID NO: 61716 - DNA, 22 bp, synthetic construct
  misc_feature 1..22: note = chemically synthesized
  source 1..22: mol_type = other DNA
tattttattttattttattatt

SEQ ID NO: 61717 - DNA, 22 bp, synthetic construct
  misc_feature 1..22: note = chemically synthesized
  source 1..22: mol_type = other DNA
attttattttattttattattt

SEQ ID NO: 61718 - DNA, 22 bp, synthetic construct
  misc_feature 1..22: note = chemically synthesized
  source 1..22: mol_type = other DNA
ttttattttattttattatttg

SEQ ID NO: 61719 - DNA, 22 bp, synthetic construct
  misc_feature 1..22: note = chemically synthesized
  source 1..22: mol_type = other DNA
tattttattttattatttgaga

SEQ ID NO: 61720 - DNA, 22 bp, synthetic construct
  misc_feature 1..22: note = chemically synthesized
  source 1..22: mol_type = other DNA
attttattttattatttgagat

SEQ ID NO: 61721 - DNA, 22 bp, synthetic construct
  misc_feature 1..22: note = chemically synthesized
  source 1..22: mol_type = other DNA
ttttattttattatttgagatg

SEQ ID NO: 61722 - DNA, 22 bp, synthetic construct
  misc_feature 1..22: note = chemically synthesized
  source 1..22: mol_type = other DNA
tattttattatttgagatggag

SEQ ID NO: 61723 - DNA, 22 bp, synthetic construct
  misc_feature 1..22: note = chemically synthesized
  source 1..22: mol_type = other DNA
attttattatttgagatggagt

SEQ ID NO: 61724 - DNA, 22 bp, synthetic construct
  misc_feature 1..22: note = chemically synthesized
  source 1..22: mol_type = other DNA
ttttattatttgagatggagtc

SEQ ID NO: 61725 - DNA, 22 bp, synthetic construct
  misc_feature 1..22: note = chemically synthesized
  source 1..22: mol_type = other DNA
tattatttgagatggagtctca

SEQ ID NO: 61726 - DNA, 22 bp, synthetic construct
  misc_feature 1..22: note = chemically synthesized
  source 1..22: mol_type = other DNA
attatttgagatggagtctcac

SEQ ID NO: 61727 - DNA, 22 bp, synthetic construct
  misc_feature 1..22: note = chemically synthesized
  source 1..22: mol_type = other DNA
ttatttgagatggagtctcact

SEQ ID NO: 61728 - DNA, 22 bp, synthetic construct
  misc_feature 1..22: note = chemically synthesized
  source 1..22: mol_type = other DNA
tttgagatggagtctcactctg

SEQ ID NO: 61729 - DNA, 22 bp, synthetic construct
  misc_feature 1..22: note = chemically synthesized
  source 1..22: mol_type = other DNA
gagatggagtctcactctgtca

SEQ ID NO: 61730 - DNA, 22 bp, synthetic construct
  misc_feature 1..22: note = chemically synthesized
  source 1..22: mol_type = other DNA
agatggagtctcactctgtcac

SEQ ID NO: 61731 - DNA, 22 bp, synthetic construct
  misc_feature 1..22: note = chemically synthesized
  source 1..22: mol_type = other DNA
actctgtcacccaggctggggt

SEQ ID NO: 61732 - DNA, 22 bp, synthetic construct
  misc_feature 1..22: note = chemically synthesized
  source 1..22: mol_type = other DNA
tgtcacccaggctggggtgcaa

SEQ ID NO: 61733 - DNA, 22 bp, synthetic construct
  misc_feature 1..22: note = chemically synthesized
  source 1..22: mol_type = other DNA
tcacccaggctggggtgcaatg

SEQ ID NO: 61734 - DNA, 22 bp, synthetic construct
  misc_feature 1..22: note = chemically synthesized
  source 1..22: mol_type = other DNA
gggtgcaatggcgcaatctcag

SEQ ID NO: 61735 - DNA, 22 bp, synthetic construct
  misc_feature 1..22: note = chemically synthesized
  source 1..22: mol_type = other DNA
agctcactgcaacctccaactc

SEQ ID NO: 61736 - DNA, 22 bp, synthetic construct
  misc_feature 1..22: note = chemically synthesized
  source 1..22: mol_type = other DNA
actgcaacctccaactcctggg

SEQ ID NO: 61737 - DNA, 22 bp, synthetic construct
  misc_feature 1..22: note = chemically synthesized
  source 1..22: mol_type = other DNA
caacctccaactcctggggctc

SEQ ID NO: 61738 - DNA, 22 bp, synthetic construct
  misc_feature 1..22: note = chemically synthesized
  source 1..22: mol_type = other DNA
caactcctggggctcaaatgat

SEQ ID NO: 61739 - DNA, 22 bp, synthetic construct
  misc_feature 1..22: note = chemically synthesized
  source 1..22: mol_type = other DNA
ctggggctcaaatgatcctcca

SEQ ID NO: 61740 - DNA, 22 bp, synthetic construct
  misc_feature 1..22: note = chemically synthesized
  source 1..22: mol_type = other DNA
gggctcaaatgatcctccagcc

SEQ ID NO: 61741 - DNA, 22 bp, synthetic construct
  misc_feature 1..22: note = chemically synthesized
  source 1..22: mol_type = other DNA
aaatgatcctccagcctcagcc

SEQ ID NO: 61742 - DNA, 22 bp, synthetic construct
  misc_feature 1..22: note = chemically synthesized
  source 1..22: mol_type = other DNA
cagcctcagcctcccgaatagc

SEQ ID NO: 61743 - DNA, 22 bp, synthetic construct
  misc_feature 1..22: note = chemically synthesized
  source 1..22: mol_type = other DNA
agcctcccgaatagctgggact

SEQ ID NO: 61744 - DNA, 22 bp, synthetic construct
  misc_feature 1..22: note = chemically synthesized
  source 1..22: mol_type = other DNA
ccgaatagctgggactacagat

SEQ ID NO: 61745 - DNA, 22 bp, synthetic construct
  misc_feature 1..22: note = chemically synthesized
  source 1..22: mol_type = other DNA
ggactacagatgcgtaccacca

SEQ ID NO: 61746 - DNA, 22 bp, synthetic construct
  misc_feature 1..22: note = chemically synthesized
  source 1..22: mol_type = other DNA
cagatgcgtaccaccatgcctg

SEQ ID NO: 61747 - DNA, 22 bp, synthetic construct
  misc_feature 1..22: note = chemically synthesized
  source 1..22: mol_type = other DNA
gctaatttttttattttttgta

SEQ ID NO: 61748 - DNA, 22 bp, synthetic construct
  misc_feature 1..22: note = chemically synthesized
  source 1..22: mol_type = other DNA
atttttttattttttgtagaga

SEQ ID NO: 61749 - DNA, 22 bp, synthetic construct
  misc_feature 1..22: note = chemically synthesized
  source 1..22: mol_type = other DNA
ttttattttttgtagagacagg

SEQ ID NO: 61750 - DNA, 22 bp, synthetic construct
  misc_feature 1..22: note = chemically synthesized
  source 1..22: mol_type = other DNA
tttattttttgtagagacaggg

SEQ ID NO: 61751 - DNA, 22 bp, synthetic construct
  misc_feature 1..22: note = chemically synthesized
  source 1..22: mol_type = other DNA
ttattttttgtagagacagggt

SEQ ID NO: 61752 - DNA, 22 bp, synthetic construct
  misc_feature 1..22: note = chemically synthesized
  source 1..22: mol_type = other DNA
tattttttgtagagacagggtc

SEQ ID NO: 61753 - DNA, 22 bp, synthetic construct
  misc_feature 1..22: note = chemically synthesized
  source 1..22: mol_type = other DNA
attttttgtagagacagggtct

SEQ ID NO: 61754 - DNA, 22 bp, synthetic construct
  misc_feature 1..22: note = chemically synthesized
  source 1..22: mol_type = other DNA
ttttttgtagagacagggtctc

SEQ ID NO: 61755 - DNA, 22 bp, synthetic construct
  misc_feature 1..22: note = chemically synthesized
  source 1..22: mol_type = other DNA
tttgtagagacagggtctcaag

SEQ ID NO: 61756 - DNA, 22 bp, synthetic construct
  misc_feature 1..22: note = chemically synthesized
  source 1..22: mol_type = other DNA
ttgtagagacagggtctcaagc

SEQ ID NO: 61757 - DNA, 22 bp, synthetic construct
  misc_feature 1..22: note = chemically synthesized
  source 1..22: mol_type = other DNA
tgtagagacagggtctcaagca

SEQ ID NO: 61758 - DNA, 22 bp, synthetic construct
  misc_feature 1..22: note = chemically synthesized
  source 1..22: mol_type = other DNA
gtagagacagggtctcaagcat

SEQ ID NO: 61759 - DNA, 22 bp, synthetic construct
  misc_feature 1..22: note = chemically synthesized
  source 1..22: mol_type = other DNA
tagagacagggtctcaagcatc

SEQ ID NO: 61760 - DNA, 22 bp, synthetic construct
  misc_feature 1..22: note = chemically synthesized
  source 1..22: mol_type = other DNA
aagcatcctcccgccttagcct

SEQ ID NO: 61761 - DNA, 22 bp, synthetic construct
  misc_feature 1..22: note = chemically synthesized
  source 1..22: mol_type = other DNA
ccgccttagcctcccaaagtgc

SEQ ID NO: 61762 - DNA, 22 bp, synthetic construct
  misc_feature 1..22: note = chemically synthesized
  source 1..22: mol_type = other DNA
agcctcccaaagtgctgggata

SEQ ID NO: 61763 - DNA, 22 bp, synthetic construct
  misc_feature 1..22: note = chemically synthesized
  source 1..22: mol_type = other DNA
gcctcccaaagtgctgggataa

SEQ ID NO: 61764 - DNA, 22 bp, synthetic construct
  misc_feature 1..22: note = chemically synthesized
  source 1..22: mol_type = other DNA
ccaaagtgctgggataacaggc

SEQ ID NO: 61765 - DNA, 22 bp, synthetic construct
  misc_feature 1..22: note = chemically synthesized
  source 1..22: mol_type = other DNA
ggataacaggcatgagctgctg

SEQ ID NO: 61766 - DNA, 22 bp, synthetic construct
  misc_feature 1..22: note = chemically synthesized
  source 1..22: mol_type = other DNA
ctgcactcagccatgtttttga

SEQ ID NO: 61767 - DNA, 22 bp, synthetic construct
  misc_feature 1..22: note = chemically synthesized
  source 1..22: mol_type = other DNA
cactcagccatgtttttgattt

SEQ ID NO: 61768 - DNA, 22 bp, synthetic construct
  misc_feature 1..22: note = chemically synthesized
  source 1..22: mol_type = other DNA
agccatgtttttgatttttaac

SEQ ID NO: 61769 - DNA, 22 bp, synthetic construct
  misc_feature 1..22: note = chemically synthesized
  source 1..22: mol_type = other DNA
ttgatttttaacaaaattgtaa

SEQ ID NO: 61770 - DNA, 22 bp, synthetic construct
  misc_feature 1..22: note = chemically synthesized
  source 1..22: mol_type = other DNA
tgatttttaacaaaattgtaac

SEQ ID NO: 61771 - DNA, 22 bp, synthetic construct
  misc_feature 1..22: note = chemically synthesized
  source 1..22: mol_type = other DNA
gatttttaacaaaattgtaaca

SEQ ID NO: 61772 - DNA, 22 bp, synthetic construct
  misc_feature 1..22: note = chemically synthesized
  source 1..22: mol_type = other DNA
atttttaacaaaattgtaacac

SEQ ID NO: 61773 - DNA, 22 bp, synthetic construct
  misc_feature 1..22: note = chemically synthesized
  source 1..22: mol_type = other DNA
ttaacaaaattgtaacacctta

SEQ ID NO: 61774 - DNA, 22 bp, synthetic construct
  misc_feature 1..22: note = chemically synthesized
  source 1..22: mol_type = other DNA
taacaaaattgtaacaccttaa

SEQ ID NO: 61775 - DNA, 22 bp, synthetic construct
  misc_feature 1..22: note = chemically synthesized
  source 1..22: mol_type = other DNA
aacaaaattgtaacaccttaaa

SEQ ID NO: 61776 - DNA, 22 bp, synthetic construct
  misc_feature 1..22: note = chemically synthesized
  source 1..22: mol_type = other DNA
acaaaattgtaacaccttaaaa

SEQ ID NO: 61777 - DNA, 22 bp, synthetic construct
  misc_feature 1..22: note = chemically synthesized
  source 1..22: mol_type = other DNA
taacaccttaaaaaaaatgtat

SEQ ID NO: 61778 - DNA, 22 bp, synthetic construct
  misc_feature 1..22: note = chemically synthesized
  source 1..22: mol_type = other DNA
aaaaaaaatgtataacaaggcc

SEQ ID NO: 61779 - DNA, 22 bp, synthetic construct
  misc_feature 1..22: note = chemically synthesized
  source 1..22: mol_type = other DNA
aaaaaaatgtataacaaggccg

SEQ ID NO: 61780 - DNA, 22 bp, synthetic construct
  misc_feature 1..22: note = chemically synthesized
  source 1..22: mol_type = other DNA
atgcctgtaatcccagcacttt

SEQ ID NO: 61781 - DNA, 22 bp, synthetic construct
  misc_feature 1..22: note = chemically synthesized
  source 1..22: mol_type = other DNA
taatcccagcactttgggaagc

SEQ ID NO: 61782 - DNA, 22 bp, synthetic construct
  misc_feature 1..22: note = chemically synthesized
  source 1..22: mol_type = other DNA
tgggaagccaaggcaggcagat

SEQ ID NO: 61783 - DNA, 22 bp, synthetic construct
  misc_feature 1..22: note = chemically synthesized
  source 1..22: mol_type = other DNA
gggaagccaaggcaggcagatc

SEQ ID NO: 61784 - DNA, 22 bp, synthetic construct
  misc_feature 1..22: note = chemically synthesized
  source 1..22: mol_type = other DNA
ggaagccaaggcaggcagatca

SEQ ID NO: 61785 - DNA, 22 bp, synthetic construct
  misc_feature 1..22: note = chemically synthesized
  source 1..22: mol_type = other DNA
agatcaggagttcgacctgacc

SEQ ID NO: 61786 - DNA, 22 bp, synthetic construct
  misc_feature 1..22: note = chemically synthesized
  source 1..22: mol_type = other DNA
gacctgaccaacatggtgaaac

SEQ ID NO: 61787 - DNA, 22 bp, synthetic construct
  misc_feature 1..22: note = chemically synthesized
  source 1..22: mol_type = other DNA
accaacatggtgaaaccgcgtc

SEQ ID NO: 61788 - DNA, 22 bp, synthetic construct
  misc_feature 1..22: note = chemically synthesized
  source 1..22: mol_type = other DNA
tactaaaaatacaaaaaattag

SEQ ID NO: 61789 - DNA, 22 bp, synthetic construct
  misc_feature 1..22: note = chemically synthesized
  source 1..22: mol_type = other DNA
ctaaaaatacaaaaaattagcc

SEQ ID NO: 61790 - DNA, 22 bp, synthetic construct
  misc_feature 1..22: note = chemically synthesized
  source 1..22: mol_type = other DNA
aaaatacaaaaaattagccaga

SEQ ID NO: 61791 - DNA, 22 bp, synthetic construct
  misc_feature 1..22: note = chemically synthesized
  source 1..22: mol_type = other DNA
gccagacgtggtggcacatgca

SEQ ID NO: 61792 - DNA, 22 bp, synthetic construct
  misc_feature 1..22: note = chemically synthesized
  source 1..22: mol_type = other DNA
cttgagaggctgagacaggaga

SEQ ID NO: 61793 - DNA, 22 bp, synthetic construct
  misc_feature 1..22: note = chemically synthesized
  source 1..22: mol_type = other DNA
gagaggctgagacaggagaact

SEQ ID NO: 61794 - DNA, 22 bp, synthetic construct
  misc_feature 1..22: note = chemically synthesized
  source 1..22: mol_type = other DNA
agaggctgagacaggagaactg

SEQ ID NO: 61795 - DNA, 22 bp, synthetic construct
  misc_feature 1..22: note = chemically synthesized
  source 1..22: mol_type = other DNA
agacaggagaactgcttgaacc

SEQ ID NO: 61796 - DNA, 22 bp, synthetic construct
  misc_feature 1..22: note = chemically synthesized
  source 1..22: mol_type = other DNA
cttgaaccggggaggcagaggt

SEQ ID NO: 61797 - DNA, 22 bp, synthetic construct
  misc_feature 1..22: note = chemically synthesized
  source 1..22: mol_type = other DNA
gaaccggggaggcagaggttgc

SEQ ID NO: 61798 - DNA, 22 bp, synthetic construct
  misc_feature 1..22: note = chemically synthesized
  source 1..22: mol_type = other DNA
aaccggggaggcagaggttgca

SEQ ID NO: 61799 - DNA, 22 bp, synthetic construct
  misc_feature 1..22: note = chemically synthesized
  source 1..22: mol_type = other DNA
cagtgagcccagatcacaccat

SEQ ID NO: 61800 - DNA, 22 bp, synthetic construct
  misc_feature 1..22: note = chemically synthesized
  source 1..22: mol_type = other DNA
cactccaacctgggcaacaaga

SEQ ID NO: 61801 - DNA, 22 bp, synthetic construct
  misc_feature 1..22: note = chemically synthesized
  source 1..22: mol_type = other DNA
caacctgggcaacaagagtgaa

SEQ ID NO: 61802 - DNA, 22 bp, synthetic construct
  misc_feature 1..22: note = chemically synthesized
  source 1..22: mol_type = other DNA
ggcaacaagagtgaaactccat

SEQ ID NO: 61803 - DNA, 22 bp, synthetic construct
  misc_feature 1..22: note = chemically synthesized
  source 1..22: mol_type = other DNA
catctcaaaaaaaaaaaaagct

SEQ ID NO: 61804 - DNA, 22 bp, synthetic construct
  misc_feature 1..22: note = chemically synthesized
  source 1..22: mol_type = other DNA
aaaaaaaaaaaaagctgtataa

SEQ ID NO: 61805 - DNA, 22 bp, synthetic construct
  misc_feature 1..22: note = chemically synthesized
  source 1..22: mol_type = other DNA
tataacagcttgagatataatt

SEQ ID NO: 61806 - DNA, 22 bp, synthetic construct
  misc_feature 1..22: note = chemically synthesized
  source 1..22: mol_type = other DNA
gagatataattcacaataccat

SEQ ID NO: 61807 - DNA, 22 bp, synthetic construct
  misc_feature 1..22: note = chemically synthesized
  source 1..22: mol_type = other DNA
agatataattcacaataccata

SEQ ID NO: 61808 - DNA, 22 bp, synthetic construct
  misc_feature 1..22: note = chemically synthesized
  source 1..22: mol_type = other DNA
acaataccatacaattcactca

SEQ ID NO: 61809 - DNA, 22 bp, synthetic construct
  misc_feature 1..22: note = chemically synthesized
  source 1..22: mol_type = other DNA
actcatttaaagtgtacaattc

SEQ ID NO: 61810 - DNA, 22 bp, synthetic construct
  misc_feature 1..22: note = chemically synthesized
  source 1..22: mol_type = other DNA
atttaaagtgtacaattcaggg

SEQ ID NO: 61811 - DNA, 22 bp, synthetic construct
  misc_feature 1..22: note = chemically synthesized
  source 1..22: mol_type = other DNA
aaagtgtacaattcaggggttt

SEQ ID NO: 61812 - DNA, 22 bp, synthetic construct
  misc_feature 1..22: note = chemically synthesized
  source 1..22: mol_type = other DNA
aagtgtacaattcaggggtttt

SEQ ID NO: 61813 - DNA, 22 bp, synthetic construct
  misc_feature 1..22: note = chemically synthesized
  source 1..22: mol_type = other DNA
aggggttttcattccactccaa

SEQ ID NO: 61814 - DNA, 22 bp, synthetic construct
  misc_feature 1..22: note = chemically synthesized
  source 1..22: mol_type = other DNA
tcattccactccaacccactca

SEQ ID NO: 61815 - DNA, 22 bp, synthetic construct
  misc_feature 1..22: note = chemically synthesized
  source 1..22: mol_type = other DNA
cattccactccaacccactcaa

SEQ ID NO: 61816 - DNA, 22 bp, synthetic construct
  misc_feature 1..22: note = chemically synthesized
  source 1..22: mol_type = other DNA
attccactccaacccactcaag

SEQ ID NO: 61817 - DNA, 22 bp, synthetic construct
  misc_feature 1..22: note = chemically synthesized
  source 1..22: mol_type = other DNA
cactccaacccactcaagccta

SEQ ID NO: 61818 - DNA, 22 bp, synthetic construct
  misc_feature 1..22: note = chemically synthesized
  source 1..22: mol_type = other DNA
caacccactcaagcctaggcaa

SEQ ID NO: 61819 - DNA, 22 bp, synthetic construct
  misc_feature 1..22: note = chemically synthesized
  source 1..22: mol_type = other DNA
aagcctaggcaaccactaatct

SEQ ID NO: 61820 - DNA, 22 bp, synthetic construct
  misc_feature 1..22: note = chemically synthesized
  source 1..22: mol_type = other DNA
ggcaaccactaatctactttct

SEQ ID NO: 61821 - DNA, 22 bp, synthetic construct
  misc_feature 1..22: note = chemically synthesized
  source 1..22: mol_type = other DNA
atctactttctgtctcatagat

SEQ ID NO: 61822 - DNA, 22 bp, synthetic construct
  misc_feature 1..22: note = chemically synthesized
  source 1..22: mol_type = other DNA
ctttctgtctcatagatttgcc

SEQ ID NO: 61823 - DNA, 22 bp, synthetic construct
  misc_feature 1..22: note = chemically synthesized
  source 1..22: mol_type = other DNA
tctgtctcatagatttgcctat

SEQ ID NO: 61824 - DNA, 22 bp, synthetic construct
  misc_feature 1..22: note = chemically synthesized
  source 1..22: mol_type = other DNA
ctgtctcatagatttgcctatt

SEQ ID NO: 61825 - DNA, 22 bp, synthetic construct
  misc_feature 1..22: note = chemically synthesized
  source 1..22: mol_type = other DNA
tgtctcatagatttgcctattt

SEQ ID NO: 61826 - DNA, 22 bp, synthetic construct
  misc_feature 1..22: note = chemically synthesized
  source 1..22: mol_type = other DNA
tctcatagatttgcctatttgg

SEQ ID NO: 61827 - DNA, 22 bp, synthetic construct
  misc_feature 1..22: note = chemically synthesized
  source 1..22: mol_type = other DNA
atagatttgcctatttggggca

SEQ ID NO: 61828 - DNA, 22 bp, synthetic construct
  misc_feature 1..22: note = chemically synthesized
  source 1..22: mol_type = other DNA
gcctatttggggcatttcatat

SEQ ID NO: 61829 - DNA, 22 bp, synthetic construct
  misc_feature 1..22: note = chemically synthesized
  source 1..22: mol_type = other DNA
cctatttggggcatttcatata

SEQ ID NO: 61830 - DNA, 22 bp, synthetic construct
  misc_feature 1..22: note = chemically synthesized
  source 1..22: mol_type = other DNA
tttggggcatttcatataaata

SEQ ID NO: 61831 - DNA, 22 bp, synthetic construct
  misc_feature 1..22: note = chemically synthesized
  source 1..22: mol_type = other DNA
ggggcatttcatataaatagac

SEQ ID NO: 61832 - DNA, 22 bp, synthetic construct
  misc_feature 1..22: note = chemically synthesized
  source 1..22: mol_type = other DNA
gggcatttcatataaatagact

SEQ ID NO: 61833 - DNA, 22 bp, synthetic construct
  misc_feature 1..22: note = chemically synthesized
  source 1..22: mol_type = other DNA
catataaatagactcctacaat

SEQ ID NO: 61834 - DNA, 22 bp, synthetic construct
  misc_feature 1..22: note = chemically synthesized
  source 1..22: mol_type = other DNA
atataaatagactcctacaata

SEQ ID NO: 61835 - DNA, 22 bp, synthetic construct
  misc_feature 1..22: note = chemically synthesized
  source 1..22: mol_type = other DNA
ctacaatatgtggccttttgtg

SEQ ID NO: 61836 - DNA, 22 bp, synthetic construct
  misc_feature 1..22: note = chemically synthesized
  source 1..22: mol_type = other DNA
caatatgtggccttttgtgtct

SEQ ID NO: 61837 - DNA, 22 bp, synthetic construct
  misc_feature 1..22: note = chemically synthesized
  source 1..22: mol_type = other DNA
ttgtgtctggcctctttcactt

SEQ ID NO: 61838 - DNA, 22 bp, synthetic construct
  misc_feature 1..22: note = chemically synthesized
  source 1..22: mol_type = other DNA
tgtgtctggcctctttcactta

SEQ ID NO: 61839 - DNA, 22 bp, synthetic construct
  misc_feature 1..22: note = chemically synthesized
  source 1..22: mol_type = other DNA
gtgtctggcctctttcacttag

SEQ ID NO: 61840 - DNA, 22 bp, synthetic construct
  misc_feature 1..22: note = chemically synthesized
  source 1..22: mol_type = other DNA
tgtctggcctctttcacttagc

SEQ ID NO: 61841 - DNA, 22 bp, synthetic construct
  misc_feature 1..22: note = chemically synthesized
  source 1..22: mol_type = other DNA
gcctctttcacttagcatgatg

SEQ ID NO: 61842 - DNA, 22 bp, synthetic construct
  misc_feature 1..22: note = chemically synthesized
  source 1..22: mol_type = other DNA
tttcacttagcatgatgttttc

SEQ ID NO: 61843 - DNA, 22 bp, synthetic construct
  misc_feature 1..22: note = chemically synthesized
  source 1..22: mol_type = other DNA
tcacttagcatgatgttttcaa

SEQ ID NO: 61844 - DNA, 22 bp, synthetic construct
  misc_feature 1..22: note = chemically synthesized
  source 1..22: mol_type = other DNA
cacttagcatgatgttttcaag

SEQ ID NO: 61845 - DNA, 22 bp, synthetic construct
  misc_feature 1..22: note = chemically synthesized
  source 1..22: mol_type = other DNA
acttagcatgatgttttcaagg

SEQ ID NO: 61846 - DNA, 22 bp, synthetic construct
  misc_feature 1..22: note = chemically synthesized
  source 1..22: mol_type = other DNA
agcatgatgttttcaaggttta

SEQ ID NO: 61847 - DNA, 22 bp, synthetic construct
  misc_feature 1..22: note = chemically synthesized
  source 1..22: mol_type = other DNA
gcatgatgttttcaaggtttat

SEQ ID NO: 61848 - DNA, 22 bp, synthetic construct
  misc_feature 1..22: note = chemically synthesized
  source 1..22: mol_type = other DNA
tcaaggtttatctgtgttataa

SEQ ID NO: 61849 - DNA, 22 bp, synthetic construct
  misc_feature 1..22: note = chemically synthesized
  source 1..22: mol_type = other DNA
caaggtttatctgtgttataac

SEQ ID NO: 61850 - DNA, 22 bp, synthetic construct
  misc_feature 1..22: note = chemically synthesized
  source 1..22: mol_type = other DNA
aaggtttatctgtgttataaca

SEQ ID NO: 61851 - DNA, 22 bp, synthetic construct
  misc_feature 1..22: note = chemically synthesized
  source 1..22: mol_type = other DNA
atctgtgttataacatatattg

SEQ ID NO: 61852 - DNA, 22 bp, synthetic construct
  misc_feature 1..22: note = chemically synthesized
  source 1..22: mol_type = other DNA
tctgtgttataacatatattgg

SEQ ID NO: 61853 - DNA, 22 bp, synthetic construct
  misc_feature 1..22: note = chemically synthesized
  source 1..22: mol_type = other DNA
tgttataacatatattggtact

SEQ ID NO: 61854 - DNA, 22 bp, synthetic construct
  misc_feature 1..22: note = chemically synthesized
  source 1..22: mol_type = other DNA
taacatatattggtacttcatt

SEQ ID NO: 61855 - DNA, 22 bp, synthetic construct
  misc_feature 1..22: note = chemically synthesized
  source 1..22: mol_type = other DNA
gtacttcatttctttttatgga

SEQ ID NO: 61856 - DNA, 22 bp, synthetic construct
  misc_feature 1..22: note = chemically synthesized
  source 1..22: mol_type = other DNA
catttctttttatggacaagta

SEQ ID NO: 61857 - DNA, 22 bp, synthetic construct
  misc_feature 1..22: note = chemically synthesized
  source 1..22: mol_type = other DNA
atttctttttatggacaagtaa

SEQ ID NO: 61858 - DNA, 22 bp, synthetic construct
  misc_feature 1..22: note = chemically synthesized
  source 1..22: mol_type = other DNA
ctttttatggacaagtaatatt

SEQ ID NO: 61859 - DNA, 22 bp, synthetic construct
  misc_feature 1..22: note = chemically synthesized
  source 1..22: mol_type = other DNA
tttttatggacaagtaatattc

SEQ ID NO: 61860 - DNA, 22 bp, synthetic construct
  misc_feature 1..22: note = chemically synthesized
  source 1..22: mol_type = other DNA
tttatggacaagtaatattcca

SEQ ID NO: 61861 - DNA, 22 bp, synthetic construct
  misc_feature 1..22: note = chemically synthesized
  source 1..22: mol_type = other DNA
ttatggacaagtaatattccat

SEQ ID NO: 61862 - DNA, 22 bp, synthetic construct
  misc_feature 1..22: note = chemically synthesized
  source 1..22: mol_type = other DNA
tatggacaagtaatattccatt

SEQ ID NO: 61863 - DNA, 22 bp, synthetic construct
  misc_feature 1..22: note = chemically synthesized
  source 1..22: mol_type = other DNA
atggacaagtaatattccattg

SEQ ID NO: 61864 - DNA, 22 bp, synthetic construct
  misc_feature 1..22: note = chemically synthesized
  source 1..22: mol_type = other DNA
tggacaagtaatattccattgt

SEQ ID NO: 61865 - DNA, 22 bp, synthetic construct
  misc_feature 1..22: note = chemically synthesized
  source 1..22: mol_type = other DNA
cattgtatgaatatataacatt

SEQ ID NO: 61866 - DNA, 22 bp, synthetic construct
  misc_feature 1..22: note = chemically synthesized
  source 1..22: mol_type = other DNA
tatgaatatataacattgtatg

SEQ ID NO: 61867 - DNA, 22 bp, synthetic construct
  misc_feature 1..22: note = chemically synthesized
  source 1..22: mol_type = other DNA
tatgaatataccacattttatt

SEQ ID NO: 61868 - DNA, 22 bp, synthetic construct
  misc_feature 1..22: note = chemically synthesized
  source 1..22: mol_type = other DNA
tatttatctgtttatcaggcca

SEQ ID NO: 61869 - DNA, 22 bp, synthetic construct
  misc_feature 1..22: note = chemically synthesized
  source 1..22: mol_type = other DNA
atttatctgtttatcaggccag

SEQ ID NO: 61870 - DNA, 22 bp, synthetic construct
  misc_feature 1..22: note = chemically synthesized
  source 1..22: mol_type = other DNA
tttatctgtttatcaggccagg

SEQ ID NO: 61871 - DNA, 22 bp, synthetic construct
  misc_feature 1..22: note = chemically synthesized
  source 1..22: mol_type = other DNA
atctgtttatcaggccaggcat

SEQ ID NO: 61872 - DNA, 22 bp, synthetic construct
  misc_feature 1..22: note = chemically synthesized
  source 1..22: mol_type = other DNA
tctgtttatcaggccaggcatg

SEQ ID NO: 61873 - DNA, 22 bp, synthetic construct
  misc_feature 1..22: note = chemically synthesized
  source 1..22: mol_type = other DNA
tttatcaggccaggcatggtgg

SEQ ID NO: 61874 - DNA, 22 bp, synthetic construct
  misc_feature 1..22: note = chemically synthesized
  source 1..22: mol_type = other DNA
atcaggccaggcatggtggctc

SEQ ID NO: 61875 - DNA, 22 bp, synthetic construct
  misc_feature 1..22: note = chemically synthesized
  source 1..22: mol_type = other DNA
tcaggccaggcatggtggctca

SEQ ID NO: 61876 - DNA, 22 bp, synthetic construct
  misc_feature 1..22: note = chemically synthesized
  source 1..22: mol_type = other DNA
acatctgtaatcccagcacttt

SEQ ID NO: 61877 - DNA, 22 bp, synthetic construct
  misc_feature 1..22: note = chemically synthesized
  source 1..22: mol_type = other DNA
taatcccagcactttgggaggc

SEQ ID NO: 61878 - DNA, 22 bp, synthetic construct
  misc_feature 1..22: note = chemically synthesized
  source 1..22: mol_type = other DNA
tgggaggctgaggcaggaggat

SEQ ID NO: 61879 - DNA, 22 bp, synthetic construct
  misc_feature 1..22: note = chemically synthesized
  source 1..22: mol_type = other DNA
gggaggctgaggcaggaggatt

SEQ ID NO: 61880 - DNA, 22 bp, synthetic construct
  misc_feature 1..22: note = chemically synthesized
  source 1..22: mol_type = other DNA
ggaggctgaggcaggaggatta

SEQ ID NO: 61881 - DNA, 22 bp, synthetic construct
  misc_feature 1..22: note = chemically synthesized
  source 1..22: mol_type = other DNA
aggcaggaggattacttgagcc

SEQ ID NO: 61882 - DNA, 22 bp, synthetic construct
  misc_feature 1..22: note = chemically synthesized
  source 1..22: mol_type = other DNA
aagtaatcctcctgcctcagcc

SEQ ID NO: 61883 - DNA, 22 bp, synthetic construct
  misc_feature 1..22: note = chemically synthesized
  source 1..22: mol_type = other DNA
ctgcctcagcctcccaaagtgc

SEQ ID NO: 61884 - DNA, 22 bp, synthetic construct
  misc_feature 1..22: note = chemically synthesized
  source 1..22: mol_type = other DNA
cctcagcctcccaaagtgctgg

SEQ ID NO: 61885 - DNA, 22 bp, synthetic construct
  misc_feature 1..22: note = chemically synthesized
  source 1..22: mol_type = other DNA
agcctcccaaagtgctgggatt

SEQ ID NO: 61886 - DNA, 22 bp, synthetic construct
  misc_feature 1..22: note = chemically synthesized
  source 1..22: mol_type = other DNA
ccaaagtgctgggattacagat

SEQ ID NO: 61887 - DNA, 22 bp, synthetic construct
  misc_feature 1..22: note = chemically synthesized
  source 1..22: mol_type = other DNA
ggattacagatgtgagccacca

SEQ ID NO: 61888 - DNA, 22 bp, synthetic construct
  misc_feature 1..22: note = chemically synthesized
  source 1..22: mol_type = other DNA
cagatgtgagccaccatgcctg

SEQ ID NO: 61889 - DNA, 22 bp, synthetic construct
  misc_feature 1..22: note = chemically synthesized
  source 1..22: mol_type = other DNA
gcctgataaacagataaataaa

SEQ ID NO: 61890 - DNA, 22 bp, synthetic construct
  misc_feature 1..22: note = chemically synthesized
  source 1..22: mol_type = other DNA
ataaacagataaataaaatgtg

SEQ ID NO: 61891 - DNA, 22 bp, synthetic construct
  misc_feature 1..22: note = chemically synthesized
  source 1..22: mol_type = other DNA
atacaatgttatatattcatac

SEQ ID NO: 61892 - DNA, 22 bp, synthetic construct
  misc_feature 1..22: note = chemically synthesized
  source 1..22: mol_type = other DNA
tatattcatacaatggaatatt

SEQ ID NO: 61893 - DNA, 22 bp, synthetic construct
  misc_feature 1..22: note = chemically synthesized
  source 1..22: mol_type = other DNA
atacaatggaatattacttgtc

SEQ ID NO: 61894 - DNA, 22 bp, synthetic construct
  misc_feature 1..22: note = chemically synthesized
  source 1..22: mol_type = other DNA
cttgtccataaaaagaaatgaa

SEQ ID NO: 61895 - DNA, 22 bp, synthetic construct
  misc_feature 1..22: note = chemically synthesized
  source 1..22: mol_type = other DNA
gtccataaaaagaaatgaagta

SEQ ID NO: 61896 - DNA, 22 bp, synthetic construct
  misc_feature 1..22: note = chemically synthesized
  source 1..22: mol_type = other DNA
tccataaaaagaaatgaagtac

SEQ ID NO: 61897 - DNA, 22 bp, synthetic construct
  misc_feature 1..22: note = chemically synthesized
  source 1..22: mol_type = other DNA
taacacagataaaccttgaaaa

SEQ ID NO: 61898 - DNA, 22 bp, synthetic construct
  misc_feature 1..22: note = chemically synthesized
  source 1..22: mol_type = other DNA
gaaaacatcatgctaagtgaaa

SEQ ID NO: 61899 - DNA, 22 bp, synthetic construct
  misc_feature 1..22: note = chemically synthesized
  source 1..22: mol_type = other DNA
aaaacatcatgctaagtgaaag

SEQ ID NO: 61900 - DNA, 22 bp, synthetic construct
  misc_feature 1..22: note = chemically synthesized
  source 1..22: mol_type = other DNA
agtgaaagaggccagacacaaa

SEQ ID NO: 61901 - DNA, 22 bp, synthetic construct
  misc_feature 1..22: note = chemically synthesized
  source 1..22: mol_type = other DNA
taggagtctatttatatgaaat

SEQ ID NO: 61902 - DNA, 22 bp, synthetic construct
  misc_feature 1..22: note = chemically synthesized
  source 1..22: mol_type = other DNA
tttatatgaaatgccccaaata

SEQ ID NO: 61903 - DNA, 22 bp, synthetic construct
  misc_feature 1..22: note = chemically synthesized
  source 1..22: mol_type = other DNA
atatgaaatgccccaaataggc

SEQ ID NO: 61904 - DNA, 22 bp, synthetic construct
  misc_feature 1..22: note = chemically synthesized
  source 1..22: mol_type = other DNA
tatgaaatgccccaaataggca

SEQ ID NO: 61905 - DNA, 22 bp, synthetic construct
  misc_feature 1..22: note = chemically synthesized
  source 1..22: mol_type = other DNA
tgagacagaaagtagattagtg

SEQ ID NO: 61906 - DNA, 22 bp, synthetic construct
  misc_feature 1..22: note = chemically synthesized
  source 1..22: mol_type = other DNA
gtggttgcctaggcttgagtgg

SEQ ID NO: 61907 - DNA, 22 bp, synthetic construct
  misc_feature 1..22: note = chemically synthesized
  source 1..22: mol_type = other DNA
cctaggcttgagtgggttggag

SEQ ID NO: 61908 - DNA, 22 bp, synthetic construct
  misc_feature 1..22: note = chemically synthesized
  source 1..22: mol_type = other DNA
ggcttgagtgggttggagtgga

SEQ ID NO: 61909 - DNA, 22 bp, synthetic construct
  misc_feature 1..22: note = chemically synthesized
  source 1..22: mol_type = other DNA
gagtgggttggagtggaatgaa

SEQ ID NO: 61910 - DNA, 22 bp, synthetic construct
  misc_feature 1..22: note = chemically synthesized
  source 1..22: mol_type = other DNA
agtgggttggagtggaatgaaa

SEQ ID NO: 61911 - DNA, 22 bp, synthetic construct
  misc_feature 1..22: note = chemically synthesized
  source 1..22: mol_type = other DNA
gagtggaatgaaaacccctgaa

SEQ ID NO: 61912 - DNA, 22 bp, synthetic construct
  misc_feature 1..22: note = chemically synthesized
  source 1..22: mol_type = other DNA
aattgtacactttaaatgagtg

SEQ ID NO: 61913 - DNA, 22 bp, synthetic construct
  misc_feature 1..22: note = chemically synthesized
  source 1..22: mol_type = other DNA
tacactttaaatgagtgaattg

SEQ ID NO: 61914 - DNA, 22 bp, synthetic construct
  misc_feature 1..22: note = chemically synthesized
  source 1..22: mol_type = other DNA
taaatgagtgaattgtatggta

SEQ ID NO: 61915 - DNA, 22 bp, synthetic construct
  misc_feature 1..22: note = chemically synthesized
  source 1..22: mol_type = other DNA
aaatgagtgaattgtatggtat

SEQ ID NO: 61916 - DNA, 22 bp, synthetic construct
  misc_feature 1..22: note = chemically synthesized
  source 1..22: mol_type = other DNA
aatgagtgaattgtatggtatt

SEQ ID NO: 61917 - DNA, 22 bp, synthetic construct
  misc_feature 1..22: note = chemically synthesized
  source 1..22: mol_type = other DNA
tatggtattgtgaattatatct

SEQ ID NO: 61918 - DNA, 22 bp, synthetic construct
  misc_feature 1..22: note = chemically synthesized
  source 1..22: mol_type = other DNA
tgaattatatctcaagctgtta

SEQ ID NO: 61919 - DNA, 22 bp, synthetic construct
  misc_feature 1..22: note = chemically synthesized
  source 1..22: mol_type = other DNA
tatctcaagctgttatacagct

SEQ ID NO: 61920 - DNA, 22 bp, synthetic construct
  misc_feature 1..22: note = chemically synthesized
  source 1..22: mol_type = other DNA
aagctgttatacagcttttttt

SEQ ID NO: 61921 - DNA, 22 bp, synthetic construct
  misc_feature 1..22: note = chemically synthesized
  source 1..22: mol_type = other DNA
ttatacagcttttttttttttt

SEQ ID NO: 61922 - DNA, 22 bp, synthetic construct
  misc_feature 1..22: note = chemically synthesized
  source 1..22: mol_type = other DNA
tacagctttttttttttttgag

SEQ ID NO: 61923 - DNA, 22 bp, synthetic construct
  misc_feature 1..22: note = chemically synthesized
  source 1..22: mol_type = other DNA
tttttttttttgagatggagtt

SEQ ID NO: 61924 - DNA, 22 bp, synthetic construct
  misc_feature 1..22: note = chemically synthesized
  source 1..22: mol_type = other DNA
ttttttttttgagatggagttt

SEQ ID NO: 61925 - DNA, 22 bp, synthetic construct
  misc_feature 1..22: note = chemically synthesized
  source 1..22: mol_type = other DNA
tttttttttgagatggagtttc

SEQ ID NO: 61926 - DNA, 22 bp, synthetic construct
  misc_feature 1..22: note = chemically synthesized
  source 1..22: mol_type = other DNA
ttttttttgagatggagtttca

SEQ ID NO: 61927 - DNA, 22 bp, synthetic construct
  misc_feature 1..22: note = chemically synthesized
  source 1..22: mol_type = other DNA
tttttttgagatggagtttcac

SEQ ID NO: 61928 - DNA, 22 bp, synthetic construct
  misc_feature 1..22: note = chemically synthesized
  source 1..22: mol_type = other DNA
ttttttgagatggagtttcact

SEQ ID NO: 61929 - DNA, 22 bp, synthetic construct
  misc_feature 1..22: note = chemically synthesized
  source 1..22: mol_type = other DNA
tttttgagatggagtttcactc

SEQ ID NO: 61930 - DNA, 22 bp, synthetic construct
  misc_feature 1..22: note = chemically synthesized
  source 1..22: mol_type = other DNA
ttttgagatggagtttcactct

SEQ ID NO: 61931 - DNA, 22 bp, synthetic construct
  misc_feature 1..22: note = chemically synthesized
  source 1..22: mol_type = other DNA
tttgagatggagtttcactctt

SEQ ID NO: 61932 - DNA, 22 bp, synthetic construct
  misc_feature 1..22: note = chemically synthesized
  source 1..22: mol_type = other DNA
ttgagatggagtttcactcttg

SEQ ID NO: 61933 - DNA, 22 bp, synthetic construct
  misc_feature 1..22: note = chemically synthesized
  source 1..22: mol_type = other DNA
tgagatggagtttcactcttgt

SEQ ID NO: 61934 - DNA, 22 bp, synthetic construct
  misc_feature 1..22: note = chemically synthesized
  source 1..22: mol_type = other DNA
gagatggagtttcactcttgtt

SEQ ID NO: 61935 - DNA, 22 bp, synthetic construct
  misc_feature 1..22: note = chemically synthesized
  source 1..22: mol_type = other DNA
agatggagtttcactcttgttg

SEQ ID NO: 61936 - DNA, 22 bp, synthetic construct
  misc_feature 1..22: note = chemically synthesized
  source 1..22: mol_type = other DNA
cactcttgttgcccaggttgga

SEQ ID NO: 61937 - DNA, 22 bp, synthetic construct
  misc_feature 1..22: note = chemically synthesized
  source 1..22: mol_type = other DNA
actcttgttgcccaggttggag

SEQ ID NO: 61938 - DNA, 22 bp, synthetic construct
  misc_feature 1..22: note = chemically synthesized
  source 1..22: mol_type = other DNA
ttgttgcccaggttggagtgca

SEQ ID NO: 61939 - DNA, 22 bp, synthetic construct
  misc_feature 1..22: note = chemically synthesized
  source 1..22: mol_type = other DNA
gttgcccaggttggagtgcaat

SEQ ID NO: 61940 - DNA, 22 bp, synthetic construct
  misc_feature 1..22: note = chemically synthesized
  source 1..22: mol_type = other DNA
ttgcccaggttggagtgcaatg

SEQ ID NO: 61941 - DNA, 22 bp, synthetic construct
  misc_feature 1..22: note = chemically synthesized
  source 1..22: mol_type = other DNA
cccaggttggagtgcaatggtg

SEQ ID NO: 61942 - DNA, 22 bp, synthetic construct
  misc_feature 1..22: note = chemically synthesized
  source 1..22: mol_type = other DNA
gagtgcaatggtgtgatctggg

SEQ ID NO: 61943 - DNA, 22 bp, synthetic construct
  misc_feature 1..22: note = chemically synthesized
  source 1..22: mol_type = other DNA
ggctcactgcaacctctgcctc

SEQ ID NO: 61944 - DNA, 22 bp, synthetic construct
  misc_feature 1..22: note = chemically synthesized
  source 1..22: mol_type = other DNA
actgcaacctctgcctccccgg

SEQ ID NO: 61945 - DNA, 22 bp, synthetic construct
  misc_feature 1..22: note = chemically synthesized
  source 1..22: mol_type = other DNA
caacctctgcctccccggttca

SEQ ID NO: 61946 - DNA, 22 bp, synthetic construct
  misc_feature 1..22: note = chemically synthesized
  source 1..22: mol_type = other DNA
tgcctccccggttcaagcagtt

SEQ ID NO: 61947 - DNA, 22 bp, synthetic construct
  misc_feature 1..22: note = chemically synthesized
  source 1..22: mol_type = other DNA
cctccccggttcaagcagttct

SEQ ID NO: 61948 - DNA, 22 bp, synthetic construct
  misc_feature 1..22: note = chemically synthesized
  source 1..22: mol_type = other DNA
cccggttcaagcagttctcctg

SEQ ID NO: 61949 - DNA, 22 bp, synthetic construct
  misc_feature 1..22: note = chemically synthesized
  source 1..22: mol_type = other DNA
aagcagttctcctgtctcagcc

SEQ ID NO: 61950 - DNA, 22 bp, synthetic construct
  misc_feature 1..22: note = chemically synthesized
  source 1..22: mol_type = other DNA
tcctgtctcagcctctcaagta

SEQ ID NO: 61951 - DNA, 22 bp, synthetic construct
  misc_feature 1..22: note = chemically synthesized
  source 1..22: mol_type = other DNA
ctgtctcagcctctcaagtagc

SEQ ID NO: 61952 - DNA, 22 bp, synthetic construct
  misc_feature 1..22: note = chemically synthesized
  source 1..22: mol_type = other DNA
tctcagcctctcaagtagctgg

SEQ ID NO: 61953 - DNA, 22 bp, synthetic construct
  misc_feature 1..22: note = chemically synthesized
  source 1..22: mol_type = other DNA
agcctctcaagtagctgggatt

SEQ ID NO: 61954 - DNA, 22 bp, synthetic construct
  misc_feature 1..22: note = chemically synthesized
  source 1..22: mol_type = other DNA
tcaagtagctgggattacatgc

SEQ ID NO: 61955 - DNA, 22 bp, synthetic construct
  misc_feature 1..22: note = chemically synthesized
  source 1..22: mol_type = other DNA
aagtagctgggattacatgcat

SEQ ID NO: 61956 - DNA, 22 bp, synthetic construct
  misc_feature 1..22: note = chemically synthesized
  source 1..22: mol_type = other DNA
ggattacatgcatgtgccacca

SEQ ID NO: 61957 - DNA, 22 bp, synthetic construct
  misc_feature 1..22: note = chemically synthesized
  source 1..22: mol_type = other DNA
catgcatgtgccaccacgtctg

SEQ ID NO: 61958 - DNA, 22 bp, synthetic construct
  misc_feature 1..22: note = chemically synthesized
  source 1..22: mol_type = other DNA
gctaattttttgtatttttagt

SEQ ID NO: 61959 - DNA, 22 bp, synthetic construct
  misc_feature 1..22: note = chemically synthesized
  source 1..22: mol_type = other DNA
attttttgtatttttagtagag

SEQ ID NO: 61960 - DNA, 22 bp, synthetic construct
  misc_feature 1..22: note = chemically synthesized
  source 1..22: mol_type = other DNA
tttgtatttttagtagagacgc

SEQ ID NO: 61961 - DNA, 22 bp, synthetic construct
  misc_feature 1..22: note = chemically synthesized
  source 1..22: mol_type = other DNA
ttgtatttttagtagagacgcg

SEQ ID NO: 61962 - DNA, 22 bp, synthetic construct
  misc_feature 1..22: note = chemically synthesized
  source 1..22: mol_type = other DNA
tgtatttttagtagagacgcgg

SEQ ID NO: 61963 - DNA, 22 bp, synthetic construct
  misc_feature 1..22: note = chemically synthesized
  source 1..22: mol_type = other DNA
gtatttttagtagagacgcggt

SEQ ID NO: 61964 - DNA, 22 bp, synthetic construct
  misc_feature 1..22: note = chemically synthesized
  source 1..22: mol_type = other DNA
tatttttagtagagacgcggtt

SEQ ID NO: 61965 - DNA, 22 bp, synthetic construct
  misc_feature 1..22: note = chemically synthesized
  source 1..22: mol_type = other DNA
ttagtagagacgcggtttcacc

SEQ ID NO: 61966 - DNA, 22 bp, synthetic construct
  misc_feature 1..22: note = chemically synthesized
  source 1..22: mol_type = other DNA
tagtagagacgcggtttcacca

SEQ ID NO: 61967 - DNA, 22 bp, synthetic construct
  misc_feature 1..22: note = chemically synthesized
  source 1..22: mol_type = other DNA
agtagagacgcggtttcaccat

SEQ ID NO: 61968 - DNA, 22 bp, synthetic construct
  misc_feature 1..22: note = chemically synthesized
  source 1..22: mol_type = other DNA
gtagagacgcggtttcaccatg

SEQ ID NO: 61969 - DNA, 22 bp, synthetic construct
  misc_feature 1..22: note = chemically synthesized
  source 1..22: mol_type = other DNA
caccatgttggtcaggtcgaac

SEQ ID NO: 61970 - DNA, 22 bp, synthetic construct
  misc_feature 1..22: note = chemically synthesized
  source 1..22: mol_type = other DNA
accatgttggtcaggtcgaact

SEQ ID NO: 61971 - DNA, 22 bp, synthetic construct
  misc_feature 1..22: note = chemically synthesized
  source 1..22: mol_type = other DNA
gtcaggtcgaactcctgatctc

SEQ ID NO: 61972 - DNA, 22 bp, synthetic construct
  misc_feature 1..22: note = chemically synthesized
  source 1..22: mol_type = other DNA
ctgatctcaggtgatctgcctg

SEQ ID NO: 61973 - DNA, 22 bp, synthetic construct
  misc_feature 1..22: note = chemically synthesized
  source 1..22: mol_type = other DNA
atctcaggtgatctgcctgcct

SEQ ID NO: 61974 - DNA, 22 bp, synthetic construct
  misc_feature 1..22: note = chemically synthesized
  source 1..22: mol_type = other DNA
aggtgatctgcctgccttggct

SEQ ID NO: 61975 - DNA, 22 bp, synthetic construct
  misc_feature 1..22: note = chemically synthesized
  source 1..22: mol_type = other DNA
cctgccttggcttcccaaagtg

SEQ ID NO: 61976 - DNA, 22 bp, synthetic construct
  misc_feature 1..22: note = chemically synthesized
  source 1..22: mol_type = other DNA
ccttggcttcccaaagtgctgg

SEQ ID NO: 61977 - DNA, 22 bp, synthetic construct
  misc_feature 1..22: note = chemically synthesized
  source 1..22: mol_type = other DNA
ggcttcccaaagtgctgggatt

SEQ ID NO: 61978 - DNA, 22 bp, synthetic construct
  misc_feature 1..22: note = chemically synthesized
  source 1..22: mol_type = other DNA
gcttcccaaagtgctgggatta

SEQ ID NO: 61979 - DNA, 22 bp, synthetic construct
  misc_feature 1..22: note = chemically synthesized
  source 1..22: mol_type = other DNA
cccaaagtgctgggattacagg

SEQ ID NO: 61980 - DNA, 22 bp, synthetic construct
  misc_feature 1..22: note = chemically synthesized
  source 1..22: mol_type = other DNA
ccaaagtgctgggattacaggc

SEQ ID NO: 61981 - DNA, 22 bp, synthetic construct
  misc_feature 1..22: note = chemically synthesized
  source 1..22: mol_type = other DNA
ggattacaggcatgagccaccg

SEQ ID NO: 61982 - DNA, 22 bp, synthetic construct
  misc_feature 1..22: note = chemically synthesized
  source 1..22: mol_type = other DNA
caggcatgagccaccgtgcccg

SEQ ID NO: 61983 - DNA, 22 bp, synthetic construct
  misc_feature 1..22: note = chemically synthesized
  source 1..22: mol_type = other DNA
gttatacattttttttaaggtg

SEQ ID NO: 61984 - DNA, 22 bp, synthetic construct
  misc_feature 1..22: note = chemically synthesized
  source 1..22: mol_type = other DNA
ttatacattttttttaaggtgt

SEQ ID NO: 61985 - DNA, 22 bp, synthetic construct
  misc_feature 1..22: note = chemically synthesized
  source 1..22: mol_type = other DNA
tacattttttttaaggtgttac

SEQ ID NO: 61986 - DNA, 22 bp, synthetic construct
  misc_feature 1..22: note = chemically synthesized
  source 1..22: mol_type = other DNA
tttttaaggtgttacaattttg

SEQ ID NO: 61987 - DNA, 22 bp, synthetic construct
  misc_feature 1..22: note = chemically synthesized
  source 1..22: mol_type = other DNA
ttttaaggtgttacaattttgt

SEQ ID NO: 61988 - DNA, 22 bp, synthetic construct
  misc_feature 1..22: note = chemically synthesized
  source 1..22: mol_type = other DNA
tttaaggtgttacaattttgtt

SEQ ID NO: 61989 - DNA, 22 bp, synthetic construct
  misc_feature 1..22: note = chemically synthesized
  source 1..22: mol_type = other DNA
ttaaggtgttacaattttgtta

SEQ ID NO: 61990 - DNA, 22 bp, synthetic construct
  misc_feature 1..22: note = chemically synthesized
  source 1..22: mol_type = other DNA
taaggtgttacaattttgttaa

SEQ ID NO: 61991 - DNA, 22 bp, synthetic construct
  misc_feature 1..22: note = chemically synthesized
  source 1..22: mol_type = other DNA
aaggtgttacaattttgttaaa

SEQ ID NO: 61992 - DNA, 22 bp, synthetic construct
  misc_feature 1..22: note = chemically synthesized
  source 1..22: mol_type = other DNA
aggtgttacaattttgttaaaa

SEQ ID NO: 61993 - DNA, 22 bp, synthetic construct
  misc_feature 1..22: note = chemically synthesized
  source 1..22: mol_type = other DNA
caattttgttaaaaatcaaaaa

SEQ ID NO: 61994 - DNA, 22 bp, synthetic construct
  misc_feature 1..22: note = chemically synthesized
  source 1..22: mol_type = other DNA
tgttaaaaatcaaaaacatggc

SEQ ID NO: 61995 - DNA, 22 bp, synthetic construct
  misc_feature 1..22: note = chemically synthesized
  source 1..22: mol_type = other DNA
gttaaaaatcaaaaacatggct

SEQ ID NO: 61996 - DNA, 22 bp, synthetic construct
  misc_feature 1..22: note = chemically synthesized
  source 1..22: mol_type = other DNA
ttaaaaatcaaaaacatggctg

SEQ ID NO: 61997 - DNA, 22 bp, synthetic construct
  misc_feature 1..22: note = chemically synthesized
  source 1..22: mol_type = other DNA
aaaatcaaaaacatggctgagt

SEQ ID NO: 61998 - DNA, 22 bp, synthetic construct
  misc_feature 1..22: note = chemically synthesized
  source 1..22: mol_type = other DNA
agtgcagcagctcatgcctgtt

SEQ ID NO: 61999 - DNA, 22 bp, synthetic construct
  misc_feature 1..22: note = chemically synthesized
  source 1..22: mol_type = other DNA
atgcctgttatcccagcacttt

SEQ ID NO: 62000 - DNA, 22 bp, synthetic construct
  misc_feature 1..22: note = chemically synthesized
  source 1..22: mol_type = other DNA
ttatcccagcactttgggaggc

SEQ ID NO: 62001 - DNA, 22 bp, synthetic construct
  misc_feature 1..22: note = chemically synthesized
  source 1..22: mol_type = other DNA
tcccagcactttgggaggctaa

SEQ ID NO: 62002 - DNA, 22 bp, synthetic construct
  misc_feature 1..22: note = chemically synthesized
  source 1..22: mol_type = other DNA
tgggaggctaaggcgggaggat

SEQ ID NO: 62003 - DNA, 22 bp, synthetic construct
  misc_feature 1..22: note = chemically synthesized
  source 1..22: mol_type = other DNA
gggaggctaaggcgggaggatg

SEQ ID NO: 62004 - DNA, 22 bp, synthetic construct
  misc_feature 1..22: note = chemically synthesized
  source 1..22: mol_type = other DNA
ggaggctaaggcgggaggatgc

SEQ ID NO: 62005 - DNA, 22 bp, synthetic construct
  misc_feature 1..22: note = chemically synthesized
  source 1..22: mol_type = other DNA
aggcgggaggatgcttgagacc

SEQ ID NO: 62006 - DNA, 22 bp, synthetic construct
  misc_feature 1..22: note = chemically synthesized
  source 1..22: mol_type = other DNA
gagaccctgtctctacaaaaaa

SEQ ID NO: 62007 - DNA, 22 bp, synthetic construct
  misc_feature 1..22: note = chemically synthesized
  source 1..22: mol_type = other DNA
agaccctgtctctacaaaaaat

SEQ ID NO: 62008 - DNA, 22 bp, synthetic construct
  misc_feature 1..22: note = chemically synthesized
  source 1..22: mol_type = other DNA
tctctacaaaaaataaaaaaat

SEQ ID NO: 62009 - DNA, 22 bp, synthetic construct
  misc_feature 1..22: note = chemically synthesized
  source 1..22: mol_type = other DNA
tacaaaaaataaaaaaattagc

SEQ ID NO: 62010 - DNA, 22 bp, synthetic construct
  misc_feature 1..22: note = chemically synthesized
  source 1..22: mol_type = other DNA
caaaaaataaaaaaattagcca

SEQ ID NO: 62011 - DNA, 22 bp, synthetic construct
  misc_feature 1..22: note = chemically synthesized
  source 1..22: mol_type = other DNA
gccaggcatggtggtacgcatc

SEQ ID NO: 62012 - DNA, 22 bp, synthetic construct
  misc_feature 1..22: note = chemically synthesized
  source 1..22: mol_type = other DNA
tagtcccagctattcgggaggc

SEQ ID NO: 62013 - DNA, 22 bp, synthetic construct
  misc_feature 1..22: note = chemically synthesized
  source 1..22: mol_type = other DNA
ttcgggaggctgaggctggagg

SEQ ID NO: 62014 - DNA, 22 bp, synthetic construct
  misc_feature 1..22: note = chemically synthesized
  source 1..22: mol_type = other DNA
gggaggctgaggctggaggatc

SEQ ID NO: 62015 - DNA, 22 bp, synthetic construct
  misc_feature 1..22: note = chemically synthesized
  source 1..22: mol_type = other DNA
aggctggaggatcatttgagcc

SEQ ID NO: 62016 - DNA, 22 bp, synthetic construct
  misc_feature 1..22: note = chemically synthesized
  source 1..22: mol_type = other DNA
gaggatcatttgagccccagga

SEQ ID NO: 62017 - DNA, 22 bp, synthetic construct
  misc_feature 1..22: note = chemically synthesized
  source 1..22: mol_type = other DNA
gagccccaggagttggaggttg

SEQ ID NO: 62018 - DNA, 22 bp, synthetic construct
  misc_feature 1..22: note = chemically synthesized
  source 1..22: mol_type = other DNA
agccccaggagttggaggttgc

SEQ ID NO: 62019 - DNA, 22 bp, synthetic construct
  misc_feature 1..22: note = chemically synthesized
  source 1..22: mol_type = other DNA
gaggttgcagtgagctgagatt

SEQ ID NO: 62020 - DNA, 22 bp, synthetic construct
  misc_feature 1..22: note = chemically synthesized
  source 1..22: mol_type = other DNA
cagtgagctgagattgcgccat

SEQ ID NO: 62021 - DNA, 22 bp, synthetic construct
  misc_feature 1..22: note = chemically synthesized
  source 1..22: mol_type = other DNA
agattgcgccattgcaccccag

SEQ ID NO: 62022 - DNA, 22 bp, synthetic construct
  misc_feature 1..22: note = chemically synthesized
  source 1..22: mol_type = other DNA
cgccattgcaccccagcctggg

SEQ ID NO: 62023 - DNA, 22 bp, synthetic construct
  misc_feature 1..22: note = chemically synthesized
  source 1..22: mol_type = other DNA
caccccagcctgggtgacagag

SEQ ID NO: 62024 - DNA, 22 bp, synthetic construct
  misc_feature 1..22: note = chemically synthesized
  source 1..22: mol_type = other DNA
ggtgacagagtgagactccatc

SEQ ID NO: 62025 - DNA, 22 bp, synthetic construct
  misc_feature 1..22: note = chemically synthesized
  source 1..22: mol_type = other DNA
catctcaaataataaaataaaa

SEQ ID NO: 62026 - DNA, 22 bp, synthetic construct
  misc_feature 1..22: note = chemically synthesized
  source 1..22: mol_type = other DNA
aaataataaaataaaataaaat

SEQ ID NO: 62027 - DNA, 22 bp, synthetic construct
  misc_feature 1..22: note = chemically synthesized
  source 1..22: mol_type = other DNA
agcctttggtctatgtgtgatg

SEQ ID NO: 62028 - DNA, 22 bp, synthetic construct
  misc_feature 1..22: note = chemically synthesized
  source 1..22: mol_type = other DNA
tggtctatgtgtgatgtggcag

SEQ ID NO: 62029 - DNA, 22 bp, synthetic construct
  misc_feature 1..22: note = chemically synthesized
  source 1..22: mol_type = other DNA
ggtctatgtgtgatgtggcagc

SEQ ID NO: 62030 - DNA, 22 bp, synthetic construct
  misc_feature 1..22: note = chemically synthesized
  source 1..22: mol_type = other DNA
gtctatgtgtgatgtggcagca

SEQ ID NO: 62031 - DNA, 22 bp, synthetic construct
  misc_feature 1..22: note = chemically synthesized
  source 1..22: mol_type = other DNA
tgtgtgatgtggcagcactggt

SEQ ID NO: 62032 - DNA, 22 bp, synthetic construct
  misc_feature 1..22: note = chemically synthesized
  source 1..22: mol_type = other DNA
gtccacgcagcagaagttggac

SEQ ID NO: 62033 - DNA, 22 bp, synthetic construct
  misc_feature 1..22: note = chemically synthesized
  source 1..22: mol_type = other DNA
gacttccttaatgggtctattt

SEQ ID NO: 62034 - DNA, 22 bp, synthetic construct
  misc_feature 1..22: note = chemically synthesized
  source 1..22: mol_type = other DNA
ccttaatgggtctattttcttt

SEQ ID NO: 62035 - DNA, 22 bp, synthetic construct
  misc_feature 1..22: note = chemically synthesized
  source 1..22: mol_type = other DNA
cttaatgggtctattttctttg

SEQ ID NO: 62036 - DNA, 22 bp, synthetic construct
  misc_feature 1..22: note = chemically synthesized
  source 1..22: mol_type = other DNA
aatgggtctattttctttgggc

SEQ ID NO: 62037 - DNA, 22 bp, synthetic construct
  misc_feature 1..22: note = chemically synthesized
  source 1..22: mol_type = other DNA
atgggtctattttctttgggca

SEQ ID NO: 62038 - DNA, 22 bp, synthetic construct
  misc_feature 1..22: note = chemically synthesized
  source 1..22: mol_type = other DNA
ttttctttgggcaataatagaa

SEQ ID NO: 62039 - DNA, 22 bp, synthetic construct
  misc_feature 1..22: note = chemically synthesized
  source 1..22: mol_type = other DNA
tctttgggcaataatagaattg

SEQ ID NO: 62040 - DNA, 22 bp, synthetic construct
  misc_feature 1..22: note = chemically synthesized
  source 1..22: mol_type = other DNA
ctttgggcaataatagaattgc

SEQ ID NO: 62041 - DNA, 22 bp, synthetic construct
  misc_feature 1..22: note = chemically synthesized
  source 1..22: mol_type = other DNA
tttgggcaataatagaattgca

SEQ ID NO: 62042 - DNA, 22 bp, synthetic construct
  misc_feature 1..22: note = chemically synthesized
  source 1..22: mol_type = other DNA
tgggcaataatagaattgcatt

SEQ ID NO: 62043 - DNA, 22 bp, synthetic construct
  misc_feature 1..22: note = chemically synthesized
  source 1..22: mol_type = other DNA
gggcaataatagaattgcattg

SEQ ID NO: 62044 - DNA, 22 bp, synthetic construct
  misc_feature 1..22: note = chemically synthesized
  source 1..22: mol_type = other DNA
ggcaataatagaattgcattgc

SEQ ID NO: 62045 - DNA, 22 bp, synthetic construct
  misc_feature 1..22: note = chemically synthesized
  source 1..22: mol_type = other DNA
cattgcgtgtgtgtgtgtgtgt

SEQ ID NO: 62046 - DNA, 22 bp, synthetic construct
  misc_feature 1..22: note = chemically synthesized
  source 1..22: mol_type = other DNA
cgtgtgtgtgtgtgtgtatcat

SEQ ID NO: 62047 - DNA, 22 bp, synthetic construct
  misc_feature 1..22: note = chemically synthesized
  source 1..22: mol_type = other DNA
aagcctaccacctgaaaactga

SEQ ID NO: 62048 - DNA, 22 bp, synthetic construct
  misc_feature 1..22: note = chemically synthesized
  source 1..22: mol_type = other DNA
ccacctgaaaactgatacacta

SEQ ID NO: 62049 - DNA, 22 bp, synthetic construct
  misc_feature 1..22: note = chemically synthesized
  source 1..22: mol_type = other DNA
aaaactgatacactactagaac

SEQ ID NO: 62050 - DNA, 22 bp, synthetic construct
  misc_feature 1..22: note = chemically synthesized
  source 1..22: mol_type = other DNA
atacactactagaacattctac

SEQ ID NO: 62051 - DNA, 22 bp, synthetic construct
  misc_feature 1..22: note = chemically synthesized
  source 1..22: mol_type = other DNA
ctagaacattctaccaaattat

SEQ ID NO: 62052 - DNA, 22 bp, synthetic construct
  misc_feature 1..22: note = chemically synthesized
  source 1..22: mol_type = other DNA
gaacattctaccaaattatgcc

SEQ ID NO: 62053 - DNA, 22 bp, synthetic construct
  misc_feature 1..22: note = chemically synthesized
  source 1..22: mol_type = other DNA
taccaaattatgccataacatg

SEQ ID NO: 62054 - DNA, 22 bp, synthetic construct
  misc_feature 1..22: note = chemically synthesized
  source 1..22: mol_type = other DNA
ccaaattatgccataacatgac

SEQ ID NO: 62055 - DNA, 22 bp, synthetic construct
  misc_feature 1..22: note = chemically synthesized
  source 1..22: mol_type = other DNA
tgccataacatgacatggacct

SEQ ID NO: 62056 - DNA, 22 bp, synthetic construct
  misc_feature 1..22: note = chemically synthesized
  source 1..22: mol_type = other DNA
gctttaaaactgtcatcggtca

SEQ ID NO: 62057 - DNA, 22 bp, synthetic construct
  misc_feature 1..22: note = chemically synthesized
  source 1..22: mol_type = other DNA
ctttaaaactgtcatcggtcac

SEQ ID NO: 62058 - DNA, 22 bp, synthetic construct
  misc_feature 1..22: note = chemically synthesized
  source 1..22: mol_type = other DNA
taaaactgtcatcggtcactta

SEQ ID NO: 62059 - DNA, 22 bp, synthetic construct
  misc_feature 1..22: note = chemically synthesized
  source 1..22: mol_type = other DNA
aaaactgtcatcggtcacttaa

SEQ ID NO: 62060 - DNA, 22 bp, synthetic construct
  misc_feature 1..22: note = chemically synthesized
  source 1..22: mol_type = other DNA
aaactgtcatcggtcacttaaa

SEQ ID NO: 62061 - DNA, 22 bp, synthetic construct
  misc_feature 1..22: note = chemically synthesized
  source 1..22: mol_type = other DNA
tcatcggtcacttaaacttgcc

SEQ ID NO: 62062 - DNA, 22 bp, synthetic construct
  misc_feature 1..22: note = chemically synthesized
  source 1..22: mol_type = other DNA
aaacttgcctcacaagccattt

SEQ ID NO: 62063 - DNA, 22 bp, synthetic construct
  misc_feature 1..22: note = chemically synthesized
  source 1..22: mol_type = other DNA
aacttgcctcacaagccatttc

SEQ ID NO: 62064 - DNA, 22 bp, synthetic construct
  misc_feature 1..22: note = chemically synthesized
  source 1..22: mol_type = other DNA
gcctcacaagccatttctaaag

SEQ ID NO: 62065 - DNA, 22 bp, synthetic construct
  misc_feature 1..22: note = chemically synthesized
  source 1..22: mol_type = other DNA
cctcacaagccatttctaaagt

SEQ ID NO: 62066 - DNA, 22 bp, synthetic construct
  misc_feature 1..22: note = chemically synthesized
  source 1..22: mol_type = other DNA
acaagccatttctaaagtggac

SEQ ID NO: 62067 - DNA, 22 bp, synthetic construct
  misc_feature 1..22: note = chemically synthesized
  source 1..22: mol_type = other DNA
ctaaagtggacgtaaatctata

SEQ ID NO: 62068 - DNA, 22 bp, synthetic construct
  misc_feature 1..22: note = chemically synthesized
  source 1..22: mol_type = other DNA
taaagtggacgtaaatctataa

SEQ ID NO: 62069 - DNA, 22 bp, synthetic construct
  misc_feature 1..22: note = chemically synthesized
  source 1..22: mol_type = other DNA
aagtggacgtaaatctataact

SEQ ID NO: 62070 - DNA, 22 bp, synthetic construct
  misc_feature 1..22: note = chemically synthesized
  source 1..22: mol_type = other DNA
taacttagggaacagatgagtg

SEQ ID NO: 62071 - DNA, 22 bp, synthetic construct
  misc_feature 1..22: note = chemically synthesized
  source 1..22: mol_type = other DNA
agggaacagatgagtgatcaaa

SEQ ID NO: 62072 - DNA, 22 bp, synthetic construct
  misc_feature 1..22: note = chemically synthesized
  source 1..22: mol_type = other DNA
gggaacagatgagtgatcaaaa

SEQ ID NO: 62073 - DNA, 22 bp, synthetic construct
  misc_feature 1..22: note = chemically synthesized
  source 1..22: mol_type = other DNA
tgtctaataagcaggatatatt

SEQ ID NO: 62074 - DNA, 22 bp, synthetic construct
  misc_feature 1..22: note = chemically synthesized
  source 1..22: mol_type = other DNA
tctaataagcaggatatattac

SEQ ID NO: 62075 - DNA, 22 bp, synthetic construct
  misc_feature 1..22: note = chemically synthesized
  source 1..22: mol_type = other DNA
ataagcaggatatattacaaaa

SEQ ID NO: 62076 - DNA, 22 bp, synthetic construct
  misc_feature 1..22: note = chemically synthesized
  source 1..22: mol_type = other DNA
caaaatgattattttgtatctg

SEQ ID NO: 62077 - DNA, 22 bp, synthetic construct
  misc_feature 1..22: note = chemically synthesized
  source 1..22: mol_type = other DNA
ttttgtatctgggattacaggc

SEQ ID NO: 62078 - DNA, 22 bp, synthetic construct
  misc_feature 1..22: note = chemically synthesized
  source 1..22: mol_type = other DNA
tgtatctgggattacaggcgcg

SEQ ID NO: 62079 - DNA, 22 bp, synthetic construct
  misc_feature 1..22: note = chemically synthesized
  source 1..22: mol_type = other DNA
gtatctgggattacaggcgcga

SEQ ID NO: 62080 - DNA, 22 bp, synthetic construct
  misc_feature 1..22: note = chemically synthesized
  source 1..22: mol_type = other DNA
tatctgggattacaggcgcgag

SEQ ID NO: 62081 - DNA, 22 bp, synthetic construct
  misc_feature 1..22: note = chemically synthesized
  source 1..22: mol_type = other DNA
ggattacaggcgcgagccacag

SEQ ID NO: 62082 - DNA, 22 bp, synthetic construct
  misc_feature 1..22: note = chemically synthesized
  source 1..22: mol_type = other DNA
caggcgcgagccacagcaccca

SEQ ID NO: 62083 - DNA, 22 bp, synthetic construct
  misc_feature 1..22: note = chemically synthesized
  source 1..22: mol_type = other DNA
cttgcttctttttttttttttt

SEQ ID NO: 62084 - DNA, 22 bp, synthetic construct
  misc_feature 1..22: note = chemically synthesized
  source 1..22: mol_type = other DNA
gcttcttttttttttttttttc

SEQ ID NO: 62085 - DNA, 22 bp, synthetic construct
  misc_feature 1..22: note = chemically synthesized
  source 1..22: mol_type = other DNA
cttcttttttttttttttttct

SEQ ID NO: 62086 - DNA, 22 bp, synthetic construct
  misc_feature 1..22: note = chemically synthesized
  source 1..22: mol_type = other DNA
cttttttttttttttttctgag

SEQ ID NO: 62087 - DNA, 22 bp, synthetic construct
  misc_feature 1..22: note = chemically synthesized
  source 1..22: mol_type = other DNA
ttttttttttttttttctgaga

SEQ ID NO: 62088 - DNA, 22 bp, synthetic construct
  misc_feature 1..22: note = chemically synthesized
  source 1..22: mol_type = other DNA
ttttttttttttttctgagaca

SEQ ID NO: 62089 - DNA, 22 bp, synthetic construct
  misc_feature 1..22: note = chemically synthesized
  source 1..22: mol_type = other DNA
tttttttttttttctgagacag

SEQ ID NO: 62090 - DNA, 22 bp, synthetic construct
  misc_feature 1..22: note = chemically synthesized
  source 1..22: mol_type = other DNA
ttttttttttttctgagacagg

SEQ ID NO: 62091 - DNA, 22 bp, synthetic construct
  misc_feature 1..22: note = chemically synthesized
  source 1..22: mol_type = other DNA
tttttttttttctgagacaggg

SEQ ID NO: 62092 - DNA, 22 bp, synthetic construct
  misc_feature 1..22: note = chemically synthesized
  source 1..22: mol_type = other DNA
ttttttttttctgagacagggt

SEQ ID NO: 62093 - DNA, 22 bp, synthetic construct
  misc_feature 1..22: note = chemically synthesized
  source 1..22: mol_type = other DNA
tttttttttctgagacagggtc

SEQ ID NO: 62094 - DNA, 22 bp, synthetic construct
  misc_feature 1..22: note = chemically synthesized
  source 1..22: mol_type = other DNA
ttttttttctgagacagggtct

SEQ ID NO: 62095 - DNA, 22 bp, synthetic construct
  misc_feature 1..22: note = chemically synthesized
  source 1..22: mol_type = other DNA
tttttttctgagacagggtctc

SEQ ID NO: 62096 - DNA, 22 bp, synthetic construct
  misc_feature 1..22: note = chemically synthesized
  source 1..22: mol_type = other DNA
ttttttctgagacagggtctca

SEQ ID NO: 62097 - DNA, 22 bp, synthetic construct
  misc_feature 1..22: note = chemically synthesized
  source 1..22: mol_type = other DNA
tttttctgagacagggtctcac

SEQ ID NO: 62098 - DNA, 22 bp, synthetic construct
  misc_feature 1..22: note = chemically synthesized
  source 1..22: mol_type = other DNA
ttttctgagacagggtctcact

SEQ ID NO: 62099 - DNA, 22 bp, synthetic construct
  misc_feature 1..22: note = chemically synthesized
  source 1..22: mol_type = other DNA
tttctgagacagggtctcactc

SEQ ID NO: 62100 - DNA, 22 bp, synthetic construct
  misc_feature 1..22: note = chemically synthesized
  source 1..22: mol_type = other DNA
ttctgagacagggtctcactct

SEQ ID NO: 62101 - DNA, 22 bp, synthetic construct
  misc_feature 1..22: note = chemically synthesized
  source 1..22: mol_type = other DNA
tctgagacagggtctcactctg

SEQ ID NO: 62102 - DNA, 22 bp, synthetic construct
  misc_feature 1..22: note = chemically synthesized
  source 1..22: mol_type = other DNA
ctgagacagggtctcactctgt

SEQ ID NO: 62103 - DNA, 22 bp, synthetic construct
  misc_feature 1..22: note = chemically synthesized
  source 1..22: mol_type = other DNA
tgagacagggtctcactctgtc

SEQ ID NO: 62104 - DNA, 22 bp, synthetic construct
  misc_feature 1..22: note = chemically synthesized
  source 1..22: mol_type = other DNA
agacagggtctcactctgtcac

SEQ ID NO: 62105 - DNA, 22 bp, synthetic construct
  misc_feature 1..22: note = chemically synthesized
  source 1..22: mol_type = other DNA
actctgtcacccaggctggagt

SEQ ID NO: 62106 - DNA, 22 bp, synthetic construct
  misc_feature 1..22: note = chemically synthesized
  source 1..22: mol_type = other DNA
tgtcacccaggctggagtgcag

SEQ ID NO: 62107 - DNA, 22 bp, synthetic construct
  misc_feature 1..22: note = chemically synthesized
  source 1..22: mol_type = other DNA
tcacccaggctggagtgcagtg

SEQ ID NO: 62108 - DNA, 22 bp, synthetic construct
  misc_feature 1..22: note = chemically synthesized
  source 1..22: mol_type = other DNA
gagtgcagtggcataatcttgg

SEQ ID NO: 62109 - DNA, 22 bp, synthetic construct
  misc_feature 1..22: note = chemically synthesized
  source 1..22: mol_type = other DNA
ggctcactgcaacctctgagct

SEQ ID NO: 62110 - DNA, 22 bp, synthetic construct
  misc_feature 1..22: note = chemically synthesized
  source 1..22: mol_type = other DNA
gctcactgcaacctctgagctc

SEQ ID NO: 62111 - DNA, 22 bp, synthetic construct
  misc_feature 1..22: note = chemically synthesized
  source 1..22: mol_type = other DNA
actgcaacctctgagctcaagg

SEQ ID NO: 62112 - DNA, 22 bp, synthetic construct
  misc_feature 1..22: note = chemically synthesized
  source 1..22: mol_type = other DNA
caacctctgagctcaagggatt

SEQ ID NO: 62113 - DNA, 22 bp, synthetic construct
  misc_feature 1..22: note = chemically synthesized
  source 1..22: mol_type = other DNA
tgagctcaagggattctcccac

SEQ ID NO: 62114 - DNA, 22 bp, synthetic construct
  misc_feature 1..22: note = chemically synthesized
  source 1..22: mol_type = other DNA
agctcaagggattctcccacct

SEQ ID NO: 62115 - DNA, 22 bp, synthetic construct
  misc_feature 1..22: note = chemically synthesized
  source 1..22: mol_type = other DNA
aagggattctcccacctcagcc

SEQ ID NO: 62116 - DNA, 22 bp, synthetic construct
  misc_feature 1..22: note = chemically synthesized
  source 1..22: mol_type = other DNA
tcccacctcagccacctgagta

SEQ ID NO: 62117 - DNA, 22 bp, synthetic construct
  misc_feature 1..22: note = chemically synthesized
  source 1..22: mol_type = other DNA
ccacctcagccacctgagtagt

SEQ ID NO: 62118 - DNA, 22 bp, synthetic construct
  misc_feature 1..22: note = chemically synthesized
  source 1..22: mol_type = other DNA
agccacctgagtagttaggacc

SEQ ID NO: 62119 - DNA, 22 bp, synthetic construct
  misc_feature 1..22: note = chemically synthesized
  source 1..22: mol_type = other DNA
agtagttaggaccacaggcatg

SEQ ID NO: 62120 - DNA, 22 bp, synthetic construct
  misc_feature 1..22: note = chemically synthesized
  source 1..22: mol_type = other DNA
ggaccacaggcatgcaccacca

SEQ ID NO: 62121 - DNA, 22 bp, synthetic construct
  misc_feature 1..22: note = chemically synthesized
  source 1..22: mol_type = other DNA
ggctaatgttttgtatttttgg

SEQ ID NO: 62122 - DNA, 22 bp, synthetic construct
  misc_feature 1..22: note = chemically synthesized
  source 1..22: mol_type = other DNA
gctaatgttttgtatttttggt

SEQ ID NO: 62123 - DNA, 22 bp, synthetic construct
  misc_feature 1..22: note = chemically synthesized
  source 1..22: mol_type = other DNA
atgttttgtatttttggtatag

SEQ ID NO: 62124 - DNA, 22 bp, synthetic construct
  misc_feature 1..22: note = chemically synthesized
  source 1..22: mol_type = other DNA
tgtatttttggtatagacgggg

SEQ ID NO: 62125 - DNA, 22 bp, synthetic construct
  misc_feature 1..22: note = chemically synthesized
  source 1..22: mol_type = other DNA
gtatttttggtatagacggggg

SEQ ID NO: 62126 - DNA, 22 bp, synthetic construct
  misc_feature 1..22: note = chemically synthesized
  source 1..22: mol_type = other DNA
tatttttggtatagacgggggt

SEQ ID NO: 62127 - DNA, 22 bp, synthetic construct
  misc_feature 1..22: note = chemically synthesized
  source 1..22: mol_type = other DNA
ttggtatagacgggggtctcac

SEQ ID NO: 62128 - DNA, 22 bp, synthetic construct
  misc_feature 1..22: note = chemically synthesized
  source 1..22: mol_type = other DNA
tggtatagacgggggtctcacc

SEQ ID NO: 62129 - DNA, 22 bp, synthetic construct
  misc_feature 1..22: note = chemically synthesized
  source 1..22: mol_type = other DNA
ggtatagacgggggtctcacca

SEQ ID NO: 62130 - DNA, 22 bp, synthetic construct
  misc_feature 1..22: note = chemically synthesized
  source 1..22: mol_type = other DNA
gtatagacgggggtctcaccat

SEQ ID NO: 62131 - DNA, 22 bp, synthetic construct
  misc_feature 1..22: note = chemically synthesized
  source 1..22: mol_type = other DNA
accatgttgcccaggctggtct

SEQ ID NO: 62132 - DNA, 22 bp, synthetic construct
  misc_feature 1..22: note = chemically synthesized
  source 1..22: mol_type = other DNA
cccaggctggtctcgaactcct

SEQ ID NO: 62133 - DNA, 22 bp, synthetic construct
  misc_feature 1..22: note = chemically synthesized
  source 1..22: mol_type = other DNA
gtctcgaactcctgagctcagg

SEQ ID NO: 62134 - DNA, 22 bp, synthetic construct
  misc_feature 1..22: note = chemically synthesized
  source 1..22: mol_type = other DNA
gaactcctgagctcaggcaatc

SEQ ID NO: 62135 - DNA, 22 bp, synthetic construct
  misc_feature 1..22: note = chemically synthesized
  source 1..22: mol_type = other DNA
ctgagctcaggcaatctgccac

SEQ ID NO: 62136 - DNA, 22 bp, synthetic construct
  misc_feature 1..22: note = chemically synthesized
  source 1..22: mol_type = other DNA
agctcaggcaatctgccacctc

SEQ ID NO: 62137 - DNA, 22 bp, synthetic construct
  misc_feature 1..22: note = chemically synthesized
  source 1..22: mol_type = other DNA
aggcaatctgccacctcagcct

SEQ ID NO: 62138 - DNA, 22 bp, synthetic construct
  misc_feature 1..22: note = chemically synthesized
  source 1..22: mol_type = other DNA
ccacctcagcctcccaaagtgc

SEQ ID NO: 62139 - DNA, 22 bp, synthetic construct
  misc_feature 1..22: note = chemically synthesized
  source 1..22: mol_type = other DNA
agcctcccaaagtgctgggatt

SEQ ID NO: 62140 - DNA, 22 bp, synthetic construct
  misc_feature 1..22: note = chemically synthesized
  source 1..22: mol_type = other DNA
ccaaagtgctgggattacagat

SEQ ID NO: 62141 - DNA, 22 bp, synthetic construct
  misc_feature 1..22: note = chemically synthesized
  source 1..22: mol_type = other DNA
ggattacagatgtgagccacca

SEQ ID NO: 62142 - DNA, 22 bp, synthetic construct
  misc_feature 1..22: note = chemically synthesized
  source 1..22: mol_type = other DNA
cagatgtgagccaccatgccca

SEQ ID NO: 62143 - DNA, 22 bp, synthetic construct
  misc_feature 1..22: note = chemically synthesized
  source 1..22: mol_type = other DNA
cctgatccttaacctggttcca

SEQ ID NO: 62144 - DNA, 22 bp, synthetic construct
  misc_feature 1..22: note = chemically synthesized
  source 1..22: mol_type = other DNA
atccttaacctggttccaccat

SEQ ID NO: 62145 - DNA, 22 bp, synthetic construct
  misc_feature 1..22: note = chemically synthesized
  source 1..22: mol_type = other DNA
aacctggttccaccattctgga

SEQ ID NO: 62146 - DNA, 22 bp, synthetic construct
  misc_feature 1..22: note = chemically synthesized
  source 1..22: mol_type = other DNA
acctggttccaccattctggac

SEQ ID NO: 62147 - DNA, 22 bp, synthetic construct
  misc_feature 1..22: note = chemically synthesized
  source 1..22: mol_type = other DNA
gttccaccattctggacaagat

SEQ ID NO: 62148 - DNA, 22 bp, synthetic construct
  misc_feature 1..22: note = chemically synthesized
  source 1..22: mol_type = other DNA
caccattctggacaagatgact

SEQ ID NO: 62149 - DNA, 22 bp, synthetic construct
  misc_feature 1..22: note = chemically synthesized
  source 1..22: mol_type = other DNA
tggacaagatgactaacccctc

SEQ ID NO: 62150 - DNA, 22 bp, synthetic construct
  misc_feature 1..22: note = chemically synthesized
  source 1..22: mol_type = other DNA
gacaagatgactaacccctctg

SEQ ID NO: 62151 - DNA, 22 bp, synthetic construct
  misc_feature 1..22: note = chemically synthesized
  source 1..22: mol_type = other DNA
acccctctggacctatttgtaa

SEQ ID NO: 62152 - DNA, 22 bp, synthetic construct
  misc_feature 1..22: note = chemically synthesized
  source 1..22: mol_type = other DNA
tggacctatttgtaatataagg

SEQ ID NO: 62153 - DNA, 22 bp, synthetic construct
  misc_feature 1..22: note = chemically synthesized
  source 1..22: mol_type = other DNA
gacctatttgtaatataaggat

SEQ ID NO: 62154 - DNA, 22 bp, synthetic construct
  misc_feature 1..22: note = chemically synthesized
  source 1..22: mol_type = other DNA
tttgtaatataaggataaatga

SEQ ID NO: 62155 - DNA, 22 bp, synthetic construct
  misc_feature 1..22: note = chemically synthesized
  source 1..22: mol_type = other DNA
gtaatataaggataaatgacag

SEQ ID NO: 62156 - DNA, 22 bp, synthetic construct
  misc_feature 1..22: note = chemically synthesized
  source 1..22: mol_type = other DNA
taatataaggataaatgacagt

SEQ ID NO: 62157 - DNA, 22 bp, synthetic construct
  misc_feature 1..22: note = chemically synthesized
  source 1..22: mol_type = other DNA
acagagatgttgggagaactaa

SEQ ID NO: 62158 - DNA, 22 bp, synthetic construct
  misc_feature 1..22: note = chemically synthesized
  source 1..22: mol_type = other DNA
ggagaactaagcgagttaattg

SEQ ID NO: 62159 - DNA, 22 bp, synthetic construct
  misc_feature 1..22: note = chemically synthesized
  source 1..22: mol_type = other DNA
agcgagttaattgtataaataa

SEQ ID NO: 62160 - DNA, 22 bp, synthetic construct
  misc_feature 1..22: note = chemically synthesized
  source 1..22: mol_type = other DNA
attgtataaataaagtacatag

SEQ ID NO: 62161 - DNA, 22 bp, synthetic construct
  misc_feature 1..22: note = chemically synthesized
  source 1..22: mol_type = other DNA
tataaataaagtacatagaaca

SEQ ID NO: 62162 - DNA, 22 bp, synthetic construct
  misc_feature 1..22: note = chemically synthesized
  source 1..22: mol_type = other DNA
gcataaagttagcactcaataa

SEQ ID NO: 62163 - DNA, 22 bp, synthetic construct
  misc_feature 1..22: note = chemically synthesized
  source 1..22: mol_type = other DNA
gcactcaataaactttatctgt

SEQ ID NO: 62164 - DNA, 22 bp, synthetic construct
  misc_feature 1..22: note = chemically synthesized
  source 1..22: mol_type = other DNA
aataaactttatctgttatgtt

SEQ ID NO: 62165 - DNA, 22 bp, synthetic construct
  misc_feature 1..22: note = chemically synthesized
  source 1..22: mol_type = other DNA
tatctgttatgttttcttatca

SEQ ID NO: 62166 - DNA, 22 bp, synthetic construct
  misc_feature 1..22: note = chemically synthesized
  source 1..22: mol_type = other DNA
atctgttatgttttcttatcaa

SEQ ID NO: 62167 - DNA, 22 bp, synthetic construct
  misc_feature 1..22: note = chemically synthesized
  source 1..22: mol_type = other DNA
tctgttatgttttcttatcaac

SEQ ID NO: 62168 - DNA, 22 bp, synthetic construct
  misc_feature 1..22: note = chemically synthesized
  source 1..22: mol_type = other DNA
ttatgttttcttatcaacctca

SEQ ID NO: 62169 - DNA, 22 bp, synthetic construct
  misc_feature 1..22: note = chemically synthesized
  source 1..22: mol_type = other DNA
tgttttcttatcaacctcataa

SEQ ID NO: 62170 - DNA, 22 bp, synthetic construct
  misc_feature 1..22: note = chemically synthesized
  source 1..22: mol_type = other DNA
tcttatcaacctcataaacttc

SEQ ID NO: 62171 - DNA, 22 bp, synthetic construct
  misc_feature 1..22: note = chemically synthesized
  source 1..22: mol_type = other DNA
cttatcaacctcataaacttca

SEQ ID NO: 62172 - DNA, 22 bp, synthetic construct
  misc_feature 1..22: note = chemically synthesized
  source 1..22: mol_type = other DNA
ttatcaacctcataaacttcag

SEQ ID NO: 62173 - DNA, 22 bp, synthetic construct
  misc_feature 1..22: note = chemically synthesized
  source 1..22: mol_type = other DNA
atcaacctcataaacttcaggg

SEQ ID NO: 62174 - DNA, 22 bp, synthetic construct
  misc_feature 1..22: note = chemically synthesized
  source 1..22: mol_type = other DNA
tcaacctcataaacttcaggga

SEQ ID NO: 62175 - DNA, 22 bp, synthetic construct
  misc_feature 1..22: note = chemically synthesized
  source 1..22: mol_type = other DNA
ataaacttcagggagtgggggc

SEQ ID NO: 62176 - DNA, 22 bp, synthetic construct
  misc_feature 1..22: note = chemically synthesized
  source 1..22: mol_type = other DNA
cagggagtgggggcagtattta

SEQ ID NO: 62177 - DNA, 22 bp, synthetic construct
  misc_feature 1..22: note = chemically synthesized
  source 1..22: mol_type = other DNA
agggagtgggggcagtatttac

SEQ ID NO: 62178 - DNA, 22 bp, synthetic construct
  misc_feature 1..22: note = chemically synthesized
  source 1..22: mol_type = other DNA
actttctggcagacctttcttg

SEQ ID NO: 62179 - DNA, 22 bp, synthetic construct
  misc_feature 1..22: note = chemically synthesized
  source 1..22: mol_type = other DNA
ctttctggcagacctttcttgt

SEQ ID NO: 62180 - DNA, 22 bp, synthetic construct
  misc_feature 1..22: note = chemically synthesized
  source 1..22: mol_type = other DNA
tctggcagacctttcttgtaag

SEQ ID NO: 62181 - DNA, 22 bp, synthetic construct
  misc_feature 1..22: note = chemically synthesized
  source 1..22: mol_type = other DNA
ctggcagacctttcttgtaagg

SEQ ID NO: 62182 - DNA, 22 bp, synthetic construct
  misc_feature 1..22: note = chemically synthesized
  source 1..22: mol_type = other DNA
tggcagacctttcttgtaagga

SEQ ID NO: 62183 - DNA, 22 bp, synthetic construct
  misc_feature 1..22: note = chemically synthesized
  source 1..22: mol_type = other DNA
gcagacctttcttgtaaggatc

SEQ ID NO: 62184 - DNA, 22 bp, synthetic construct
  misc_feature 1..22: note = chemically synthesized
  source 1..22: mol_type = other DNA
tcttgtaaggatcttggacttg

SEQ ID NO: 62185 - DNA, 22 bp, synthetic construct
  misc_feature 1..22: note = chemically synthesized
  source 1..22: mol_type = other DNA
cttgtaaggatcttggacttgg

SEQ ID NO: 62186 - DNA, 22 bp, synthetic construct
  misc_feature 1..22: note = chemically synthesized
  source 1..22: mol_type = other DNA
ttgtaaggatcttggacttggt

SEQ ID NO: 62187 - DNA, 22 bp, synthetic construct
  misc_feature 1..22: note = chemically synthesized
  source 1..22: mol_type = other DNA
gtaaggatcttggacttggtcc

SEQ ID NO: 62188 - DNA, 22 bp, synthetic construct
  misc_feature 1..22: note = chemically synthesized
  source 1..22: mol_type = other DNA
taaggatcttggacttggtcct

SEQ ID NO: 62189 - DNA, 22 bp, synthetic construct
  misc_feature 1..22: note = chemically synthesized
  source 1..22: mol_type = other DNA
ggacttggtccttgggagcaaa

SEQ ID NO: 62190 - DNA, 22 bp, synthetic construct
  misc_feature 1..22: note = chemically synthesized
  source 1..22: mol_type = other DNA
gacttggtccttgggagcaaat

SEQ ID NO: 62191 - DNA, 22 bp, synthetic construct
  misc_feature 1..22: note = chemically synthesized
  source 1..22: mol_type = other DNA
ggtccttgggagcaaatagatt

SEQ ID NO: 62192 - DNA, 22 bp, synthetic construct
  misc_feature 1..22: note = chemically synthesized
  source 1..22: mol_type = other DNA
gtccttgggagcaaatagatta

SEQ ID NO: 62193 - DNA, 22 bp, synthetic construct
  misc_feature 1..22: note = chemically synthesized
  source 1..22: mol_type = other DNA
gggagcaaatagattatcaagg

SEQ ID NO: 62194 - DNA, 22 bp, synthetic construct
  misc_feature 1..22: note = chemically synthesized
  source 1..22: mol_type = other DNA
ggagcaaatagattatcaagga

SEQ ID NO: 62195 - DNA, 22 bp, synthetic construct
  misc_feature 1..22: note = chemically synthesized
  source 1..22: mol_type = other DNA
tcaaggatggggctatgcctaa

SEQ ID NO: 62196 - DNA, 22 bp, synthetic construct
  misc_feature 1..22: note = chemically synthesized
  source 1..22: mol_type = other DNA
tgcctaagcagtagggttcagt

SEQ ID NO: 62197 - DNA, 22 bp, synthetic construct
  misc_feature 1..22: note = chemically synthesized
  source 1..22: mol_type = other DNA
agcagtagggttcagttcagac

SEQ ID NO: 62198 - DNA, 22 bp, synthetic construct
  misc_feature 1..22: note = chemically synthesized
  source 1..22: mol_type = other DNA
agttcagacagatcaaaaccat

SEQ ID NO: 62199 - DNA, 22 bp, synthetic construct
  misc_feature 1..22: note = chemically synthesized
  source 1..22: mol_type = other DNA
agacagatcaaaaccatttctg

SEQ ID NO: 62200 - DNA, 22 bp, synthetic construct
  misc_feature 1..22: note = chemically synthesized
  source 1..22: mol_type = other DNA
ctggccaagcgcagtggctcac

SEQ ID NO: 62201 - DNA, 22 bp, synthetic construct
  misc_feature 1..22: note = chemically synthesized
  source 1..22: mol_type = other DNA
tggccaagcgcagtggctcaca

SEQ ID NO: 62202 - DNA, 22 bp, synthetic construct
  misc_feature 1..22: note = chemically synthesized
  source 1..22: mol_type = other DNA
gccaagcgcagtggctcacact

SEQ ID NO: 62203 - DNA, 22 bp, synthetic construct
  misc_feature 1..22: note = chemically synthesized
  source 1..22: mol_type = other DNA
acactgtaatcccagcactttg

SEQ ID NO: 62204 - DNA, 22 bp, synthetic construct
  misc_feature 1..22: note = chemically synthesized
  source 1..22: mol_type = other DNA
taatcccagcactttgggaggc

SEQ ID NO: 62205 - DNA, 22 bp, synthetic construct
  misc_feature 1..22: note = chemically synthesized
  source 1..22: mol_type = other DNA
tgggaggctgaggcaggaggat

SEQ ID NO: 62206 - DNA, 22 bp, synthetic construct
  misc_feature 1..22: note = chemically synthesized
  source 1..22: mol_type = other DNA
gggaggctgaggcaggaggatc

SEQ ID NO: 62207 - DNA, 22 bp, synthetic construct
  misc_feature 1..22: note = chemically synthesized
  source 1..22: mol_type = other DNA
ggaggctgaggcaggaggatca

SEQ ID NO: 62208 - DNA, 22 bp, synthetic construct
  misc_feature 1..22: note = chemically synthesized
  source 1..22: mol_type = other DNA
aggcaggaggatcacttgaacc

SEQ ID NO: 62209 - DNA, 22 bp, synthetic construct
  misc_feature 1..22: note = chemically synthesized
  source 1..22: mol_type = other DNA
gaacccaggagttcaagaccag

SEQ ID NO: 62210 - DNA, 22 bp, synthetic construct
  misc_feature 1..22: note = chemically synthesized
  source 1..22: mol_type = other DNA
aacccaggagttcaagaccagc

SEQ ID NO: 62211 - DNA, 22 bp, synthetic construct
  misc_feature 1..22: note = chemically synthesized
  source 1..22: mol_type = other DNA
aagaccagcctgggcagcatag

SEQ ID NO: 62212 - DNA, 22 bp, synthetic construct
  misc_feature 1..22: note = chemically synthesized
  source 1..22: mol_type = other DNA
ggcagcatagtgagacccccat

SEQ ID NO: 62213 - DNA, 22 bp, synthetic construct
  misc_feature 1..22: note = chemically synthesized
  source 1..22: mol_type = other DNA
tattaaaaaaaaaaaaaagact

SEQ ID NO: 62214 - DNA, 22 bp, synthetic construct
  misc_feature 1..22: note = chemically synthesized
  source 1..22: mol_type = other DNA
ttaaaaaaaaaaaaaagactat

SEQ ID NO: 62215 - DNA, 22 bp, synthetic construct
  misc_feature 1..22: note = chemically synthesized
  source 1..22: mol_type = other DNA
aaaaaaaaaaaaagactatttt

SEQ ID NO: 62216 - DNA, 22 bp, synthetic construct
  misc_feature 1..22: note = chemically synthesized
  source 1..22: mol_type = other DNA
ttttctttctccctggttggga

SEQ ID NO: 62217 - DNA, 22 bp, synthetic construct
  misc_feature 1..22: note = chemically synthesized
  source 1..22: mol_type = other DNA
tctttctccctggttgggacca

SEQ ID NO: 62218 - DNA, 22 bp, synthetic construct
  misc_feature 1..22: note = chemically synthesized
  source 1..22: mol_type = other DNA
ctttctccctggttgggaccat

SEQ ID NO: 62219 - DNA, 22 bp, synthetic construct
  misc_feature 1..22: note = chemically synthesized
  source 1..22: mol_type = other DNA
tttctccctggttgggaccatt

SEQ ID NO: 62220 - DNA, 22 bp, synthetic construct
  misc_feature 1..22: note = chemically synthesized
  source 1..22: mol_type = other DNA
tctccctggttgggaccatttg

SEQ ID NO: 62221 - DNA, 22 bp, synthetic construct
  misc_feature 1..22: note = chemically synthesized
  source 1..22: mol_type = other DNA
ctccctggttgggaccatttga

SEQ ID NO: 62222 - DNA, 22 bp, synthetic construct
  misc_feature 1..22: note = chemically synthesized
  source 1..22: mol_type = other DNA
tccctggttgggaccatttgat

SEQ ID NO: 62223 - DNA, 22 bp, synthetic construct
  misc_feature 1..22: note = chemically synthesized
  source 1..22: mol_type = other DNA
cctggttgggaccatttgattc

SEQ ID NO: 62224 - DNA, 22 bp, synthetic construct
  misc_feature 1..22: note = chemically synthesized
  source 1..22: mol_type = other DNA
gttgggaccatttgattctgtg

SEQ ID NO: 62225 - DNA, 22 bp, synthetic construct
  misc_feature 1..22: note = chemically synthesized
  source 1..22: mol_type = other DNA
ggaccatttgattctgtgaggg

SEQ ID NO: 62226 - DNA, 22 bp, synthetic construct
  misc_feature 1..22: note = chemically synthesized
  source 1..22: mol_type = other DNA
gattctgtgaggggcctggttc

SEQ ID NO: 62227 - DNA, 22 bp, synthetic construct
  misc_feature 1..22: note = chemically synthesized
  source 1..22: mol_type = other DNA
attctgtgaggggcctggttcc

SEQ ID NO: 62228 - DNA, 22 bp, synthetic construct
  misc_feature 1..22: note = chemically synthesized
  source 1..22: mol_type = other DNA
tgtgaggggcctggttcccaca

SEQ ID NO: 62229 - DNA, 22 bp, synthetic construct
  misc_feature 1..22: note = chemically synthesized
  source 1..22: mol_type = other DNA
tgaggggcctggttcccacaac

SEQ ID NO: 62230 - DNA, 22 bp, synthetic construct
  misc_feature 1..22: note = chemically synthesized
  source 1..22: mol_type = other DNA
gttcccacaacgccctctgaga

SEQ ID NO: 62231 - DNA, 22 bp, synthetic construct
  misc_feature 1..22: note = chemically synthesized
  source 1..22: mol_type = other DNA
ccacaacgccctctgagagccc

SEQ ID NO: 62232 - DNA, 22 bp, synthetic construct
  misc_feature 1..22: note = chemically synthesized
  source 1..22: mol_type = other DNA
tgagagcccaaatccagtagga

SEQ ID NO: 62233 - DNA, 22 bp, synthetic construct
  misc_feature 1..22: note = chemically synthesized
  source 1..22: mol_type = other DNA
agagcccaaatccagtaggaga

SEQ ID NO: 62234 - DNA, 22 bp, synthetic construct
  misc_feature 1..22: note = chemically synthesized
  source 1..22: mol_type = other DNA
ccctgaatatacagactccgga

SEQ ID NO: 62235 - DNA, 22 bp, synthetic construct
  misc_feature 1..22: note = chemically synthesized
  source 1..22: mol_type = other DNA
cctgaatatacagactccggag

SEQ ID NO: 62236 - DNA, 22 bp, synthetic construct
  misc_feature 1..22: note = chemically synthesized
  source 1..22: mol_type = other DNA
aatatacagactccggagttca

SEQ ID NO: 62237 - DNA, 22 bp, synthetic construct
  misc_feature 1..22: note = chemically synthesized
  source 1..22: mol_type = other DNA
cggagttcaggtgtgaaatagc

SEQ ID NO: 62238 - DNA, 22 bp, synthetic construct
  misc_feature 1..22: note = chemically synthesized
  source 1..22: mol_type = other DNA
aggtgtgaaatagcggagctta

SEQ ID NO: 62239 - DNA, 22 bp, synthetic construct
  misc_feature 1..22: note = chemically synthesized
  source 1..22: mol_type = other DNA
accctcaggaaatccattgata

SEQ ID NO: 62240 - DNA, 22 bp, synthetic construct
  misc_feature 1..22: note = chemically synthesized
  source 1..22: mol_type = other DNA
ccctcaggaaatccattgatac

SEQ ID NO: 62241 - DNA, 22 bp, synthetic construct
  misc_feature 1..22: note = chemically synthesized
  source 1..22: mol_type = other DNA
aggaaatccattgatacggtga

SEQ ID NO: 62242 - DNA, 22 bp, synthetic construct
  misc_feature 1..22: note = chemically synthesized
  source 1..22: mol_type = other DNA
atacggtgatgatttgaggcct

SEQ ID NO: 62243 - DNA, 22 bp, synthetic construct
  misc_feature 1..22: note = chemically synthesized
  source 1..22: mol_type = other DNA
gaggcctttggaggtcgaaccc

SEQ ID NO: 62244 - DNA, 22 bp, synthetic construct
  misc_feature 1..22: note = chemically synthesized
  source 1..22: mol_type = other DNA
aggcctttggaggtcgaaccct

SEQ ID NO: 62245 - DNA, 22 bp, synthetic construct
  misc_feature 1..22: note = chemically synthesized
  source 1..22: mol_type = other DNA
tggaggtcgaaccctgcaccca

SEQ ID NO: 62246 - DNA, 22 bp, synthetic construct
  misc_feature 1..22: note = chemically synthesized
  source 1..22: mol_type = other DNA
ggaggtcgaaccctgcacccag

SEQ ID NO: 62247 - DNA, 22 bp, synthetic construct
  misc_feature 1..22: note = chemically synthesized
  source 1..22: mol_type = other DNA
gaggtcgaaccctgcacccagg

SEQ ID NO: 62248 - DNA, 22 bp, synthetic construct
  misc_feature 1..22: note = chemically synthesized
  source 1..22: mol_type = other DNA
cacccaggatgaaataaatctc

SEQ ID NO: 62249 - DNA, 22 bp, synthetic construct
  misc_feature 1..22: note = chemically synthesized
  source 1..22: mol_type = other DNA
ttagcagagaaacctgcaatag

SEQ ID NO: 62250 - DNA, 22 bp, synthetic construct
  misc_feature 1..22: note = chemically synthesized
  source 1..22: mol_type = other DNA
agcagagaaacctgcaatagct

SEQ ID NO: 62251 - DNA, 22 bp, synthetic construct
  misc_feature 1..22: note = chemically synthesized
  source 1..22: mol_type = other DNA
gcagagaaacctgcaatagctc

SEQ ID NO: 62252 - DNA, 22 bp, synthetic construct
  misc_feature 1..22: note = chemically synthesized
  source 1..22: mol_type = other DNA
caatagctcccttgagcattcc

SEQ ID NO: 62253 - DNA, 22 bp, synthetic construct
  misc_feature 1..22: note = chemically synthesized
  source 1..22: mol_type = other DNA
ccttgagcattccttggtgctg

SEQ ID NO: 62254 - DNA, 22 bp, synthetic construct
  misc_feature 1..22: note = chemically synthesized
  source 1..22: mol_type = other DNA
gagcattccttggtgctgtgac

SEQ ID NO: 62255 - DNA, 22 bp, synthetic construct
  misc_feature 1..22: note = chemically synthesized
  source 1..22: mol_type = other DNA
agcattccttggtgctgtgact

SEQ ID NO: 62256 - DNA, 22 bp, synthetic construct
  misc_feature 1..22: note = chemically synthesized
  source 1..22: mol_type = other DNA
cttggtgctgtgactggctctg

SEQ ID NO: 62257 - DNA, 22 bp, synthetic construct
  misc_feature 1..22: note = chemically synthesized
  source 1..22: mol_type = other DNA
ggtgctgtgactggctctgttt

SEQ ID NO: 62258 - DNA, 22 bp, synthetic construct
  misc_feature 1..22: note = chemically synthesized
  source 1..22: mol_type = other DNA
gtgctgtgactggctctgttta

SEQ ID NO: 62259 - DNA, 22 bp, synthetic construct
  misc_feature 1..22: note = chemically synthesized
  source 1..22: mol_type = other DNA
tgactggctctgtttagacttt

SEQ ID NO: 62260 - DNA, 22 bp, synthetic construct
  misc_feature 1..22: note = chemically synthesized
  source 1..22: mol_type = other DNA
gctctgtttagactttcttgaa

SEQ ID NO: 62261 - DNA, 22 bp, synthetic construct
  misc_feature 1..22: note = chemically synthesized
  source 1..22: mol_type = other DNA
tgtttagactttcttgaactat

SEQ ID NO: 62262 - DNA, 22 bp, synthetic construct
  misc_feature 1..22: note = chemically synthesized
  source 1..22: mol_type = other DNA
tttagactttcttgaactataa

SEQ ID NO: 62263 - DNA, 22 bp, synthetic construct
  misc_feature 1..22: note = chemically synthesized
  source 1..22: mol_type = other DNA
agactttcttgaactataaccc

SEQ ID NO: 62264 - DNA, 22 bp, synthetic construct
  misc_feature 1..22: note = chemically synthesized
  source 1..22: mol_type = other DNA
gactttcttgaactataaccca

SEQ ID NO: 62265 - DNA, 22 bp, synthetic construct
  misc_feature 1..22: note = chemically synthesized
  source 1..22: mol_type = other DNA
tcttgaactataacccaaaacc

SEQ ID NO: 62266 - DNA, 22 bp, synthetic construct
  misc_feature 1..22: note = chemically synthesized
  source 1..22: mol_type = other DNA
cttgaactataacccaaaacct

SEQ ID NO: 62267 - DNA, 22 bp, synthetic construct
  misc_feature 1..22: note = chemically synthesized
  source 1..22: mol_type = other DNA
ttgaactataacccaaaacctt

SEQ ID NO: 62268 - DNA, 22 bp, synthetic construct
  misc_feature 1..22: note = chemically synthesized
  source 1..22: mol_type = other DNA
gaactataacccaaaaccttgc

SEQ ID NO: 62269 - DNA, 22 bp, synthetic construct
  misc_feature 1..22: note = chemically synthesized
  source 1..22: mol_type = other DNA
aactataacccaaaaccttgct

SEQ ID NO: 62270 - DNA, 22 bp, synthetic construct
  misc_feature 1..22: note = chemically synthesized
  source 1..22: mol_type = other DNA
taacccaaaaccttgctgacac

SEQ ID NO: 62271 - DNA, 22 bp, synthetic construct
  misc_feature 1..22: note = chemically synthesized
  source 1..22: mol_type = other DNA
gctgacactgagttactggatt

SEQ ID NO: 62272 - DNA, 22 bp, synthetic construct
  misc_feature 1..22: note = chemically synthesized
  source 1..22: mol_type = other DNA
ctgacactgagttactggattc

SEQ ID NO: 62273 - DNA, 22 bp, synthetic construct
  misc_feature 1..22: note = chemically synthesized
  source 1..22: mol_type = other DNA
acactgagttactggattccag

SEQ ID NO: 62274 - DNA, 22 bp, synthetic construct
  misc_feature 1..22: note = chemically synthesized
  source 1..22: mol_type = other DNA
agttactggattccagagctgg

SEQ ID NO: 62275 - DNA, 22 bp, synthetic construct
  misc_feature 1..22: note = chemically synthesized
  source 1..22: mol_type = other DNA
ctggattccagagctggcctag

SEQ ID NO: 62276 - DNA, 22 bp, synthetic construct
  misc_feature 1..22: note = chemically synthesized
  source 1..22: mol_type = other DNA
gattccagagctggcctagtct

SEQ ID NO: 62277 - DNA, 22 bp, synthetic construct
  misc_feature 1..22: note = chemically synthesized
  source 1..22: mol_type = other DNA
cagagctggcctagtcttgttg

SEQ ID NO: 62278 - DNA, 22 bp, synthetic construct
  misc_feature 1..22: note = chemically synthesized
  source 1..22: mol_type = other DNA
gcctagtcttgttgtgttactg

SEQ ID NO: 62279 - DNA, 22 bp, synthetic construct
  misc_feature 1..22: note = chemically synthesized
  source 1..22: mol_type = other DNA
gtcttgttgtgttactgcaact

SEQ ID NO: 62280 - DNA, 22 bp, synthetic construct
  misc_feature 1..22: note = chemically synthesized
  source 1..22: mol_type = other DNA
gttgtgttactgcaacttgtgt

SEQ ID NO: 62281 - DNA, 22 bp, synthetic construct
  misc_feature 1..22: note = chemically synthesized
  source 1..22: mol_type = other DNA
ttgtgttactgcaacttgtgtg

SEQ ID NO: 62282 - DNA, 22 bp, synthetic construct
  misc_feature 1..22: note = chemically synthesized
  source 1..22: mol_type = other DNA
tgttactgcaacttgtgtgccc

SEQ ID NO: 62283 - DNA, 22 bp, synthetic construct
  misc_feature 1..22: note = chemically synthesized
  source 1..22: mol_type = other DNA
ctgcaacttgtgtgccctgatt

SEQ ID NO: 62284 - DNA, 22 bp, synthetic construct
  misc_feature 1..22: note = chemically synthesized
  source 1..22: mol_type = other DNA
caacttgtgtgccctgattgct

SEQ ID NO: 62285 - DNA, 22 bp, synthetic construct
  misc_feature 1..22: note = chemically synthesized
  source 1..22: mol_type = other DNA
gtgtgccctgattgcttaattt

SEQ ID NO: 62286 - DNA, 22 bp, synthetic construct
  misc_feature 1..22: note = chemically synthesized
  source 1..22: mol_type = other DNA
tgtgccctgattgcttaatttg

SEQ ID NO: 62287 - DNA, 22 bp, synthetic construct
  misc_feature 1..22: note = chemically synthesized
  source 1..22: mol_type = other DNA
attgcttaatttgatagtgacc

SEQ ID NO: 62288 - DNA, 22 bp, synthetic construct
  misc_feature 1..22: note = chemically synthesized
  source 1..22: mol_type = other DNA
cttaatttgatagtgaccctgc

SEQ ID NO: 62289 - DNA, 22 bp, synthetic construct
  misc_feature 1..22: note = chemically synthesized
  source 1..22: mol_type = other DNA
aatttgatagtgaccctgccca

SEQ ID NO: 62290 - DNA, 22 bp, synthetic construct
  misc_feature 1..22: note = chemically synthesized
  source 1..22: mol_type = other DNA
atttgatagtgaccctgcccat

SEQ ID NO: 62291 - DNA, 22 bp, synthetic construct
  misc_feature 1..22: note = chemically synthesized
  source 1..22: mol_type = other DNA
gatagtgaccctgcccatctac

SEQ ID NO: 62292 - DNA, 22 bp, synthetic construct
  misc_feature 1..22: note = chemically synthesized
  source 1..22: mol_type = other DNA
atagtgaccctgcccatctact

SEQ ID NO: 62293 - DNA, 22 bp, synthetic construct
  misc_feature 1..22: note = chemically synthesized
  source 1..22: mol_type = other DNA
cccatctactctcaagttgcaa

SEQ ID NO: 62294 - DNA, 22 bp, synthetic construct
  misc_feature 1..22: note = chemically synthesized
  source 1..22: mol_type = other DNA
ctctcaagttgcaatttgatgc

SEQ ID NO: 62295 - DNA, 22 bp, synthetic construct
  misc_feature 1..22: note = chemically synthesized
  source 1..22: mol_type = other DNA
tcaagttgcaatttgatgccat

SEQ ID NO: 62296 - DNA, 22 bp, synthetic construct
  misc_feature 1..22: note = chemically synthesized
  source 1..22: mol_type = other DNA
aagttgcaatttgatgccatag

SEQ ID NO: 62297 - DNA, 22 bp, synthetic construct
  misc_feature 1..22: note = chemically synthesized
  source 1..22: mol_type = other DNA
caatttgatgccatagagcaac

SEQ ID NO: 62298 - DNA, 22 bp, synthetic construct
  misc_feature 1..22: note = chemically synthesized
  source 1..22: mol_type = other DNA
gatgccatagagcaactcatgc

SEQ ID NO: 62299 - DNA, 22 bp, synthetic construct
  misc_feature 1..22: note = chemically synthesized
  source 1..22: mol_type = other DNA
atgccatagagcaactcatgct

SEQ ID NO: 62300 - DNA, 22 bp, synthetic construct
  misc_feature 1..22: note = chemically synthesized
  source 1..22: mol_type = other DNA
atgctgacttgtggtctggtag

SEQ ID NO: 62301 - DNA, 22 bp, synthetic construct
  misc_feature 1..22: note = chemically synthesized
  source 1..22: mol_type = other DNA
acttgtggtctggtagccaatg

SEQ ID NO: 62302 - DNA, 22 bp, synthetic construct
  misc_feature 1..22: note = chemically synthesized
  source 1..22: mol_type = other DNA
gtggtctggtagccaatgttca

SEQ ID NO: 62303 - DNA, 22 bp, synthetic construct
  misc_feature 1..22: note = chemically synthesized
  source 1..22: mol_type = other DNA
tggtctggtagccaatgttcat

SEQ ID NO: 62304 - DNA, 22 bp, synthetic construct
  misc_feature 1..22: note = chemically synthesized
  source 1..22: mol_type = other DNA
gtagccaatgttcattcttggc

SEQ ID NO: 62305 - DNA, 22 bp, synthetic construct
  misc_feature 1..22: note = chemically synthesized
  source 1..22: mol_type = other DNA
attcttggccaactctgaatct

SEQ ID NO: 62306 - DNA, 22 bp, synthetic construct
  misc_feature 1..22: note = chemically synthesized
  source 1..22: mol_type = other DNA
ttggccaactctgaatctttct

SEQ ID NO: 62307 - DNA, 22 bp, synthetic construct
  misc_feature 1..22: note = chemically synthesized
  source 1..22: mol_type = other DNA
ggccaactctgaatctttctgg

SEQ ID NO: 62308 - DNA, 22 bp, synthetic construct
  misc_feature 1..22: note = chemically synthesized
  source 1..22: mol_type = other DNA
gccaactctgaatctttctggt

SEQ ID NO: 62309 - DNA, 22 bp, synthetic construct
  misc_feature 1..22: note = chemically synthesized
  source 1..22: mol_type = other DNA
tgaatctttctggttctatgct

SEQ ID NO: 62310 - DNA, 22 bp, synthetic construct
  misc_feature 1..22: note = chemically synthesized
  source 1..22: mol_type = other DNA
aatctttctggttctatgctga

SEQ ID NO: 62311 - DNA, 22 bp, synthetic construct
  misc_feature 1..22: note = chemically synthesized
  source 1..22: mol_type = other DNA
tctggttctatgctgattttgg

SEQ ID NO: 62312 - DNA, 22 bp, synthetic construct
  misc_feature 1..22: note = chemically synthesized
  source 1..22: mol_type = other DNA
ctggttctatgctgattttggg

SEQ ID NO: 62313 - DNA, 22 bp, synthetic construct
  misc_feature 1..22: note = chemically synthesized
  source 1..22: mol_type = other DNA
tggttctatgctgattttgggc

SEQ ID NO: 62314 - DNA, 22 bp, synthetic construct
  misc_feature 1..22: note = chemically synthesized
  source 1..22: mol_type = other DNA
gttctatgctgattttgggcct

SEQ ID NO: 62315 - DNA, 22 bp, synthetic construct
  misc_feature 1..22: note = chemically synthesized
  source 1..22: mol_type = other DNA
tatgctgattttgggcctccgt

SEQ ID NO: 62316 - DNA, 22 bp, synthetic construct
  misc_feature 1..22: note = chemically synthesized
  source 1..22: mol_type = other DNA
tgctgattttgggcctccgttt

SEQ ID NO: 62317 - DNA, 22 bp, synthetic construct
  misc_feature 1..22: note = chemically synthesized
  source 1..22: mol_type = other DNA
attttgggcctccgtttatgtg

SEQ ID NO: 62318 - DNA, 22 bp, synthetic construct
  misc_feature 1..22: note = chemically synthesized
  source 1..22: mol_type = other DNA
tgggcctccgtttatgtgctca

SEQ ID NO: 62319 - DNA, 22 bp, synthetic construct
  misc_feature 1..22: note = chemically synthesized
  source 1..22: mol_type = other DNA
gggcctccgtttatgtgctcaa

SEQ ID NO: 62320 - DNA, 22 bp, synthetic construct
  misc_feature 1..22: note = chemically synthesized
  source 1..22: mol_type = other DNA
ggcctccgtttatgtgctcaac

SEQ ID NO: 62321 - DNA, 22 bp, synthetic construct
  misc_feature 1..22: note = chemically synthesized
  source 1..22: mol_type = other DNA
cgtttatgtgctcaactctgcc

SEQ ID NO: 62322 - DNA, 22 bp, synthetic construct
  misc_feature 1..22: note = chemically synthesized
  source 1..22: mol_type = other DNA
atgtgctcaactctgcctgtgc

SEQ ID NO: 62323 - DNA, 22 bp, synthetic construct
  misc_feature 1..22: note = chemically synthesized
  source 1..22: mol_type = other DNA
tgtgctcaactctgcctgtgcc

SEQ ID NO: 62324 - DNA, 22 bp, synthetic construct
  misc_feature 1..22: note = chemically synthesized
  source 1..22: mol_type = other DNA
aactctgcctgtgcccctgtgg

SEQ ID NO: 62325 - DNA, 22 bp, synthetic construct
  misc_feature 1..22: note = chemically synthesized
  source 1..22: mol_type = other DNA
tgcctgtgcccctgtggatgca

SEQ ID NO: 62326 - DNA, 22 bp, synthetic construct
  misc_feature 1..22: note = chemically synthesized
  source 1..22: mol_type = other DNA
cctgtgcccctgtggatgcatt

SEQ ID NO: 62327 - DNA, 22 bp, synthetic construct
  misc_feature 1..22: note = chemically synthesized
  source 1..22: mol_type = other DNA
tgcccctgtggatgcatttaag

SEQ ID NO: 62328 - DNA, 22 bp, synthetic construct
  misc_feature 1..22: note = chemically synthesized
  source 1..22: mol_type = other DNA
tggatgcatttaagtctcccta

SEQ ID NO: 62329 - DNA, 22 bp, synthetic construct
  misc_feature 1..22: note = chemically synthesized
  source 1..22: mol_type = other DNA
aagtctccctatccctaatggg

SEQ ID NO: 62330 - DNA, 22 bp, synthetic construct
  misc_feature 1..22: note = chemically synthesized
  source 1..22: mol_type = other DNA
agtctccctatccctaatggga

SEQ ID NO: 62331 - DNA, 22 bp, synthetic construct
  misc_feature 1..22: note = chemically synthesized
  source 1..22: mol_type = other DNA
cctatccctaatgggactctcg

SEQ ID NO: 62332 - DNA, 22 bp, synthetic construct
  misc_feature 1..22: note = chemically synthesized
  source 1..22: mol_type = other DNA
tccctaatgggactctcggtca

SEQ ID NO: 62333 - DNA, 22 bp, synthetic construct
  misc_feature 1..22: note = chemically synthesized
  source 1..22: mol_type = other DNA
atgggactctcggtcaactcaa

SEQ ID NO: 62334 - DNA, 22 bp, synthetic construct
  misc_feature 1..22: note = chemically synthesized
  source 1..22: mol_type = other DNA
tcggtcaactcaagagagagca

SEQ ID NO: 62335 - DNA, 22 bp, synthetic construct
  misc_feature 1..22: note = chemically synthesized
  source 1..22: mol_type = other DNA
ggtcaactcaagagagagcact

SEQ ID NO: 62336 - DNA, 22 bp, synthetic construct
  misc_feature 1..22: note = chemically synthesized
  source 1..22: mol_type = other DNA
aagagagagcacttttcttctc

SEQ ID NO: 62337 - DNA, 22 bp, synthetic construct
  misc_feature 1..22: note = chemically synthesized
  source 1..22: mol_type = other DNA
ttcttctccaaagggaaaatgc

SEQ ID NO: 62338 - DNA, 22 bp, synthetic construct
  misc_feature 1..22: note = chemically synthesized
  source 1..22: mol_type = other DNA
tcttctccaaagggaaaatgca

SEQ ID NO: 62339 - DNA, 22 bp, synthetic construct
  misc_feature 1..22: note = chemically synthesized
  source 1..22: mol_type = other DNA
cttctccaaagggaaaatgcag

SEQ ID NO: 62340 - DNA, 22 bp, synthetic construct
  misc_feature 1..22: note = chemically synthesized
  source 1..22: mol_type = other DNA
ttctccaaagggaaaatgcagg

SEQ ID NO: 62341 - DNA, 22 bp, synthetic construct
  misc_feature 1..22: note = chemically synthesized
  source 1..22: mol_type = other DNA
ctccaaagggaaaatgcaggca

SEQ ID NO: 62342 - DNA, 22 bp, synthetic construct
  misc_feature 1..22: note = chemically synthesized
  source 1..22: mol_type = other DNA
tccaaagggaaaatgcaggcac

SEQ ID NO: 62343 - DNA, 22 bp, synthetic construct
  misc_feature 1..22: note = chemically synthesized
  source 1..22: mol_type = other DNA
caaagggaaaatgcaggcacag

SEQ ID NO: 62344 - DNA, 22 bp, synthetic construct
  misc_feature 1..22: note = chemically synthesized
  source 1..22: mol_type = other DNA
tttgtttagggaaacagagcta

SEQ ID NO: 62345 - DNA, 22 bp, synthetic construct
  misc_feature 1..22: note = chemically synthesized
  source 1..22: mol_type = other DNA
gtttagggaaacagagctagaa

SEQ ID NO: 62346 - DNA, 22 bp, synthetic construct
  misc_feature 1..22: note = chemically synthesized
  source 1..22: mol_type = other DNA
tttagggaaacagagctagaaa

SEQ ID NO: 62347 - DNA, 22 bp, synthetic construct
  misc_feature 1..22: note = chemically synthesized
  source 1..22: mol_type = other DNA
agggaaacagagctagaaattt

SEQ ID NO: 62348 - DNA, 22 bp, synthetic construct
  misc_feature 1..22: note = chemically synthesized
  source 1..22: mol_type = other DNA
gggaaacagagctagaaattta

SEQ ID NO: 62349 - DNA, 22 bp, synthetic construct
  misc_feature 1..22: note = chemically synthesized
  source 1..22: mol_type = other DNA
gaaatttagttgggccagaatt

SEQ ID NO: 62350 - DNA, 22 bp, synthetic construct
  misc_feature 1..22: note = chemically synthesized
  source 1..22: mol_type = other DNA
agttgggccagaattagaaact

SEQ ID NO: 62351 - DNA, 22 bp, synthetic construct
  misc_feature 1..22: note = chemically synthesized
  source 1..22: mol_type = other DNA
gttgggccagaattagaaactt

SEQ ID NO: 62352 - DNA, 22 bp, synthetic construct
  misc_feature 1..22: note = chemically synthesized
  source 1..22: mol_type = other DNA
ggccagaattagaaacttcaga

SEQ ID NO: 62353 - DNA, 22 bp, synthetic construct
  misc_feature 1..22: note = chemically synthesized
  source 1..22: mol_type = other DNA
gaaacttcagatcacattgcat

SEQ ID NO: 62354 - DNA, 22 bp, synthetic construct
  misc_feature 1..22: note = chemically synthesized
  source 1..22: mol_type = other DNA
cagatcacattgcatctaaaat

SEQ ID NO: 62355 - DNA, 22 bp, synthetic construct
  misc_feature 1..22: note = chemically synthesized
  source 1..22: mol_type = other DNA
agatcacattgcatctaaaata

SEQ ID NO: 62356 - DNA, 22 bp, synthetic construct
  misc_feature 1..22: note = chemically synthesized
  source 1..22: mol_type = other DNA
catctaaaatatagtaattaac

SEQ ID NO: 62357 - DNA, 22 bp, synthetic construct
  misc_feature 1..22: note = chemically synthesized
  source 1..22: mol_type = other DNA
aaatatagtaattaacaagact

SEQ ID NO: 62358 - DNA, 22 bp, synthetic construct
  misc_feature 1..22: note = chemically synthesized
  source 1..22: mol_type = other DNA
acaagactttattcttaaataa

SEQ ID NO: 62359 - DNA, 22 bp, synthetic construct
  misc_feature 1..22: note = chemically synthesized
  source 1..22: mol_type = other DNA
tattcttaaataaaatgttgct

SEQ ID NO: 62360 - DNA, 22 bp, synthetic construct
  misc_feature 1..22: note = chemically synthesized
  source 1..22: mol_type = other DNA
attcttaaataaaatgttgctt

SEQ ID NO: 62361 - DNA, 22 bp, synthetic construct
  misc_feature 1..22: note = chemically synthesized
  source 1..22: mol_type = other DNA
ttcttaaataaaatgttgcttt

SEQ ID NO: 62362 - DNA, 22 bp, synthetic construct
  misc_feature 1..22: note = chemically synthesized
  source 1..22: mol_type = other DNA
ttaaataaaatgttgctttaat

SEQ ID NO: 62363 - DNA, 22 bp, synthetic construct
  misc_feature 1..22: note = chemically synthesized
  source 1..22: mol_type = other DNA
aaataaaatgttgctttaataa

SEQ ID NO: 62364 - DNA, 22 bp, synthetic construct
  misc_feature 1..22: note = chemically synthesized
  source 1..22: mol_type = other DNA
aataaaatgttgctttaataaa

SEQ ID NO: 62365 - DNA, 22 bp, synthetic construct
  misc_feature 1..22: note = chemically synthesized
  source 1..22: mol_type = other DNA
ctttaataaaatactgcacata

SEQ ID NO: 62366 - DNA, 22 bp, synthetic construct
  misc_feature 1..22: note = chemically synthesized
  source 1..22: mol_type = other DNA
taataaaatactgcacatatat

SEQ ID NO: 62367 - DNA, 22 bp, synthetic construct
  misc_feature 1..22: note = chemically synthesized
  source 1..22: mol_type = other DNA
aataaaatactgcacatatata

SEQ ID NO: 62368 - DNA, 22 bp, synthetic construct
  misc_feature 1..22: note = chemically synthesized
  source 1..22: mol_type = other DNA
ataaaatactgcacatatatat

SEQ ID NO: 62369 - DNA, 22 bp, synthetic construct
  misc_feature 1..22: note = chemically synthesized
  source 1..22: mol_type = other DNA
cacatatatatttttcttttca

SEQ ID NO: 62370 - DNA, 22 bp, synthetic construct
  misc_feature 1..22: note = chemically synthesized
  source 1..22: mol_type = other DNA
ttcttttcaaagatgttatgag

SEQ ID NO: 62371 - DNA, 22 bp, synthetic construct
  misc_feature 1..22: note = chemically synthesized
  source 1..22: mol_type = other DNA
tcttttcaaagatgttatgagc

SEQ ID NO: 62372 - DNA, 22 bp, synthetic construct
  misc_feature 1..22: note = chemically synthesized
  source 1..22: mol_type = other DNA
cttttcaaagatgttatgagca

SEQ ID NO: 62373 - DNA, 22 bp, synthetic construct
  misc_feature 1..22: note = chemically synthesized
  source 1..22: mol_type = other DNA
ttttcaaagatgttatgagcag

SEQ ID NO: 62374 - DNA, 22 bp, synthetic construct
  misc_feature 1..22: note = chemically synthesized
  source 1..22: mol_type = other DNA
ttcaaagatgttatgagcagga

SEQ ID NO: 62375 - DNA, 22 bp, synthetic construct
  misc_feature 1..22: note = chemically synthesized
  source 1..22: mol_type = other DNA
tcaaagatgttatgagcaggat

SEQ ID NO: 62376 - DNA, 22 bp, synthetic construct
  misc_feature 1..22: note = chemically synthesized
  source 1..22: mol_type = other DNA
caaagatgttatgagcaggatg

SEQ ID NO: 62377 - DNA, 22 bp, synthetic construct
  misc_feature 1..22: note = chemically synthesized
  source 1..22: mol_type = other DNA
aaagatgttatgagcaggatgg

SEQ ID NO: 62378 - DNA, 22 bp, synthetic construct
  misc_feature 1..22: note = chemically synthesized
  source 1..22: mol_type = other DNA
tgagcaggatggttgttttgaa

SEQ ID NO: 62379 - DNA, 22 bp, synthetic construct
  misc_feature 1..22: note = chemically synthesized
  source 1..22: mol_type = other DNA
ttttgaatgataatgtatggta

SEQ ID NO: 62380 - DNA, 22 bp, synthetic construct
  misc_feature 1..22: note = chemically synthesized
  source 1..22: mol_type = other DNA
tgaatgataatgtatggtatac

SEQ ID NO: 62381 - DNA, 22 bp, synthetic construct
  misc_feature 1..22: note = chemically synthesized
  source 1..22: mol_type = other DNA
gaatgataatgtatggtatact

SEQ ID NO: 62382 - DNA, 22 bp, synthetic construct
  misc_feature 1..22: note = chemically synthesized
  source 1..22: mol_type = other DNA
aatgataatgtatggtatacta

SEQ ID NO: 62383 - DNA, 22 bp, synthetic construct
  misc_feature 1..22: note = chemically synthesized
  source 1..22: mol_type = other DNA
tataattagtagcaaaaacaag

SEQ ID NO: 62384 - DNA, 22 bp, synthetic construct
  misc_feature 1..22: note = chemically synthesized
  source 1..22: mol_type = other DNA
gtagcaaaaacaaggactttca

SEQ ID NO: 62385 - DNA, 22 bp, synthetic construct
  misc_feature 1..22: note = chemically synthesized
  source 1..22: mol_type = other DNA
tcaaataaataggcttcagctt

SEQ ID NO: 62386 - DNA, 22 bp, synthetic construct
  misc_feature 1..22: note = chemically synthesized
  source 1..22: mol_type = other DNA
caaataaataggcttcagcttt

SEQ ID NO: 62387 - DNA, 22 bp, synthetic construct
  misc_feature 1..22: note = chemically synthesized
  source 1..22: mol_type = other DNA
aaataaataggcttcagctttt

SEQ ID NO: 62388 - DNA, 22 bp, synthetic construct
  misc_feature 1..22: note = chemically synthesized
  source 1..22: mol_type = other DNA
cagctttttttggggggtaggt

SEQ ID NO: 62389 - DNA, 22 bp, synthetic construct
  misc_feature 1..22: note = chemically synthesized
  source 1..22: mol_type = other DNA
agctttttttggggggtaggtg

SEQ ID NO: 62390 - DNA, 22 bp, synthetic construct
  misc_feature 1..22: note = chemically synthesized
  source 1..22: mol_type = other DNA
tttttggggggtaggtgggtgg

SEQ ID NO: 62391 - DNA, 22 bp, synthetic construct
  misc_feature 1..22: note = chemically synthesized
  source 1..22: mol_type = other DNA
ttttggggggtaggtgggtggg

SEQ ID NO: 62392 - DNA, 22 bp, synthetic construct
  misc_feature 1..22: note = chemically synthesized
  source 1..22: mol_type = other DNA
tttggggggtaggtgggtgggg

SEQ ID NO: 62393 - DNA, 22 bp, synthetic construct
  misc_feature 1..22: note = chemically synthesized
  source 1..22: mol_type = other DNA
ttggggggtaggtgggtggggc

SEQ ID NO: 62394 - DNA, 22 bp, synthetic construct
  misc_feature 1..22: note = chemically synthesized
  source 1..22: mol_type = other DNA
tggggggtaggtgggtggggca

SEQ ID NO: 62395 - DNA, 22 bp, synthetic construct
  misc_feature 1..22: note = chemically synthesized
  source 1..22: mol_type = other DNA
ggggggtaggtgggtggggcag

SEQ ID NO: 62396 - DNA, 22 bp, synthetic construct
  misc_feature 1..22: note = chemically synthesized
  source 1..22: mol_type = other DNA
gggggtaggtgggtggggcaga

SEQ ID NO: 62397 - DNA, 22 bp, synthetic construct
  misc_feature 1..22: note = chemically synthesized
  source 1..22: mol_type = other DNA
tgcatatcagatgagattgaaa

SEQ ID NO: 62398 - DNA, 22 bp, synthetic construct
  misc_feature 1..22: note = chemically synthesized
  source 1..22: mol_type = other DNA
catatcagatgagattgaaaaa

SEQ ID NO: 62399 - DNA, 22 bp, synthetic construct
  misc_feature 1..22: note = chemically synthesized
  source 1..22: mol_type = other DNA
aaaaacaggcaaggagggcccg

SEQ ID NO: 62400 - DNA, 22 bp, synthetic construct
  misc_feature 1..22: note = chemically synthesized
  source 1..22: mol_type = other DNA
atgcctgtaatcctagcacctt

SEQ ID NO: 62401 - DNA, 22 bp, synthetic construct
  misc_feature 1..22: note = chemically synthesized
  source 1..22: mol_type = other DNA
taatcctagcaccttgggaggc

SEQ ID NO: 62402 - DNA, 22 bp, synthetic construct
  misc_feature 1..22: note = chemically synthesized
  source 1..22: mol_type = other DNA
gcaccttgggaggccaaggcag

SEQ ID NO: 62403 - DNA, 22 bp, synthetic construct
  misc_feature 1..22: note = chemically synthesized
  source 1..22: mol_type = other DNA
gggaggccaaggcaggtggatc

SEQ ID NO: 62404 - DNA, 22 bp, synthetic construct
  misc_feature 1..22: note = chemically synthesized
  source 1..22: mol_type = other DNA
ggaggccaaggcaggtggatca

SEQ ID NO: 62405 - DNA, 22 bp, synthetic construct
  misc_feature 1..22: note = chemically synthesized
  source 1..22: mol_type = other DNA
gaggtcaggagttcgagaccag

SEQ ID NO: 62406 - DNA, 22 bp, synthetic construct
  misc_feature 1..22: note = chemically synthesized
  source 1..22: mol_type = other DNA
aggtcaggagttcgagaccagc

SEQ ID NO: 62407 - DNA, 22 bp, synthetic construct
  misc_feature 1..22: note = chemically synthesized
  source 1..22: mol_type = other DNA
gagaccagcctggccaacatga

SEQ ID NO: 62408 - DNA, 22 bp, synthetic construct
  misc_feature 1..22: note = chemically synthesized
  source 1..22: mol_type = other DNA
gccaacatgatgaaatcccatc

SEQ ID NO: 62409 - DNA, 22 bp, synthetic construct
  misc_feature 1..22: note = chemically synthesized
  source 1..22: mol_type = other DNA
ttctaaaattctaaaaatataa

SEQ ID NO: 62410 - DNA, 22 bp, synthetic construct
  misc_feature 1..22: note = chemically synthesized
  source 1..22: mol_type = other DNA
ctaaaattctaaaaatataaaa

SEQ ID NO: 62411 - DNA, 22 bp, synthetic construct
  misc_feature 1..22: note = chemically synthesized
  source 1..22: mol_type = other DNA
taaaattctaaaaatataaaaa

SEQ ID NO: 62412 - DNA, 22 bp, synthetic construct
  misc_feature 1..22: note = chemically synthesized
  source 1..22: mol_type = other DNA
aaattctaaaaatataaaaatt

SEQ ID NO: 62413 - DNA, 22 bp, synthetic construct
  misc_feature 1..22: note = chemically synthesized
  source 1..22: mol_type = other DNA
taaaaatataaaaattagcctg

SEQ ID NO: 62414 - DNA, 22 bp, synthetic construct
  misc_feature 1..22: note = chemically synthesized
  source 1..22: mol_type = other DNA
aaaatataaaaattagcctggc

SEQ ID NO: 62415 - DNA, 22 bp, synthetic construct
  misc_feature 1..22: note = chemically synthesized
  source 1..22: mol_type = other DNA
gcctggcatggtggtgcacgcc

SEQ ID NO: 62416 - DNA, 22 bp, synthetic construct
  misc_feature 1..22: note = chemically synthesized
  source 1..22: mol_type = other DNA
gcatggtggtgcacgccggtag

SEQ ID NO: 62417 - DNA, 22 bp, synthetic construct
  misc_feature 1..22: note = chemically synthesized
  source 1..22: mol_type = other DNA
gctactgaggaggctgagacat

SEQ ID NO: 62418 - DNA, 22 bp, synthetic construct
  misc_feature 1..22: note = chemically synthesized
  source 1..22: mol_type = other DNA
ctgaggaggctgagacatgaga

SEQ ID NO: 62419 - DNA, 22 bp, synthetic construct
  misc_feature 1..22: note = chemically synthesized
  source 1..22: mol_type = other DNA
aggaggctgagacatgagaatc

SEQ ID NO: 62420 - DNA, 22 bp, synthetic construct
  misc_feature 1..22: note = chemically synthesized
  source 1..22: mol_type = other DNA
agacatgagaatcgcttgaacc

SEQ ID NO: 62421 - DNA, 22 bp, synthetic construct
  misc_feature 1..22: note = chemically synthesized
  source 1..22: mol_type = other DNA
gaaccaggaggaagaggttgca

SEQ ID NO: 62422 - DNA, 22 bp, synthetic construct
  misc_feature 1..22: note = chemically synthesized
  source 1..22: mol_type = other DNA
aaccaggaggaagaggttgcag

SEQ ID NO: 62423 - DNA, 22 bp, synthetic construct
  misc_feature 1..22: note = chemically synthesized
  source 1..22: mol_type = other DNA
cagtgagccaagatcgtgccac

SEQ ID NO: 62424 - DNA, 22 bp, synthetic construct
  misc_feature 1..22: note = chemically synthesized
  source 1..22: mol_type = other DNA
cactccagcctgggtgataggt

SEQ ID NO: 62425 - DNA, 22 bp, synthetic construct
  misc_feature 1..22: note = chemically synthesized
  source 1..22: mol_type = other DNA
cagcctgggtgataggtgcgcc

SEQ ID NO: 62426 - DNA, 22 bp, synthetic construct
  misc_feature 1..22: note = chemically synthesized
  source 1..22: mol_type = other DNA
ggtgataggtgcgccgtctcaa

SEQ ID NO: 62427 - DNA, 22 bp, synthetic construct
  misc_feature 1..22: note = chemically synthesized
  source 1..22: mol_type = other DNA
aaaaaaagaaaaaaaaagaaaa

SEQ ID NO: 62428 - DNA, 22 bp, synthetic construct
  misc_feature 1..22: note = chemically synthesized
  source 1..22: mol_type = other DNA
gctagctggacatagtggcttg

SEQ ID NO: 62429 - DNA, 22 bp, synthetic construct
  misc_feature 1..22: note = chemically synthesized
  source 1..22: mol_type = other DNA
gctggacatagtggcttgcacc

SEQ ID NO: 62430 - DNA, 22 bp, synthetic construct
  misc_feature 1..22: note = chemically synthesized
  source 1..22: mol_type = other DNA
gacatagtggcttgcacctgta

SEQ ID NO: 62431 - DNA, 22 bp, synthetic construct
  misc_feature 1..22: note = chemically synthesized
  source 1..22: mol_type = other DNA
gcacctgtagtcccagctacgc

SEQ ID NO: 62432 - DNA, 22 bp, synthetic construct
  misc_feature 1..22: note = chemically synthesized
  source 1..22: mol_type = other DNA
cacctgtagtcccagctacgcg

SEQ ID NO: 62433 - DNA, 22 bp, synthetic construct
  misc_feature 1..22: note = chemically synthesized
  source 1..22: mol_type = other DNA
tagtcccagctacgcgggacgc

SEQ ID NO: 62434 - DNA, 22 bp, synthetic construct
  misc_feature 1..22: note = chemically synthesized
  source 1..22: mol_type = other DNA
cgcgggacgctgtggtagggtg

SEQ ID NO: 62435 - DNA, 22 bp, synthetic construct
  misc_feature 1..22: note = chemically synthesized
  source 1..22: mol_type = other DNA
tggtagggtgggaggactgctt

SEQ ID NO: 62436 - DNA, 22 bp, synthetic construct
  misc_feature 1..22: note = chemically synthesized
  source 1..22: mol_type = other DNA
cttgagcccaggaattcaagag

SEQ ID NO: 62437 - DNA, 22 bp, synthetic construct
  misc_feature 1..22: note = chemically synthesized
  source 1..22: mol_type = other DNA
gagcccaggaattcaagagcag

SEQ ID NO: 62438 - DNA, 22 bp, synthetic construct
  misc_feature 1..22: note = chemically synthesized
  source 1..22: mol_type = other DNA
agcccaggaattcaagagcagc

SEQ ID NO: 62439 - DNA, 22 bp, synthetic construct
  misc_feature 1..22: note = chemically synthesized
  source 1..22: mol_type = other DNA
aagagcagcctgggcaacatag

SEQ ID NO: 62440 - DNA, 22 bp, synthetic construct
  misc_feature 1..22: note = chemically synthesized
  source 1..22: mol_type = other DNA
ggcaacatagtgagaccctgtc

SEQ ID NO: 62441 - DNA, 22 bp, synthetic construct
  misc_feature 1..22: note = chemically synthesized
  source 1..22: mol_type = other DNA
tctcaaaaaaaaaaaaaaagag

SEQ ID NO: 62442 - DNA, 22 bp, synthetic construct
  misc_feature 1..22: note = chemically synthesized
  source 1..22: mol_type = other DNA
aaaaaaaaaaaaaaagagagaa

SEQ ID NO: 62443 - DNA, 22 bp, synthetic construct
  misc_feature 1..22: note = chemically synthesized
  source 1..22: mol_type = other DNA
acttttcctttaagaatgtgct

SEQ ID NO: 62444 - DNA, 22 bp, synthetic construct
  misc_feature 1..22: note = chemically synthesized
  source 1..22: mol_type = other DNA
ttcctttaagaatgtgctcttg

SEQ ID NO: 62445 - DNA, 22 bp, synthetic construct
  misc_feature 1..22: note = chemically synthesized
  source 1..22: mol_type = other DNA
tcctttaagaatgtgctcttgg

SEQ ID NO: 62446 - DNA, 22 bp, synthetic construct
  misc_feature 1..22: note = chemically synthesized
  source 1..22: mol_type = other DNA
cctttaagaatgtgctcttggt

SEQ ID NO: 62447 - DNA, 22 bp, synthetic construct
  misc_feature 1..22: note = chemically synthesized
  source 1..22: mol_type = other DNA
ctttaagaatgtgctcttggtt

SEQ ID NO: 62448 - DNA, 22 bp, synthetic construct
  misc_feature 1..22: note = chemically synthesized
  source 1..22: mol_type = other DNA
taagaatgtgctcttggttggc

SEQ ID NO: 62449 - DNA, 22 bp, synthetic construct
  misc_feature 1..22: note = chemically synthesized
  source 1..22: mol_type = other DNA
aagaatgtgctcttggttggct

SEQ ID NO: 62450 - DNA, 22 bp, synthetic construct
  misc_feature 1..22: note = chemically synthesized
  source 1..22: mol_type = other DNA
agaatgtgctcttggttggctt

SEQ ID NO: 62451 - DNA, 22 bp, synthetic construct
  misc_feature 1..22: note = chemically synthesized
  source 1..22: mol_type = other DNA
ttggttggcttgggatagagaa

SEQ ID NO: 62452 - DNA, 22 bp, synthetic construct
  misc_feature 1..22: note = chemically synthesized
  source 1..22: mol_type = other DNA
ggttggcttgggatagagaaag

SEQ ID NO: 62453 - DNA, 22 bp, synthetic construct
  misc_feature 1..22: note = chemically synthesized
  source 1..22: mol_type = other DNA
gttggcttgggatagagaaagg

SEQ ID NO: 62454 - DNA, 22 bp, synthetic construct
  misc_feature 1..22: note = chemically synthesized
  source 1..22: mol_type = other DNA
gcttgggatagagaaaggagtc

SEQ ID NO: 62455 - DNA, 22 bp, synthetic construct
  misc_feature 1..22: note = chemically synthesized
  source 1..22: mol_type = other DNA
gggatagagaaaggagtcatat

SEQ ID NO: 62456 - DNA, 22 bp, synthetic construct
  misc_feature 1..22: note = chemically synthesized
  source 1..22: mol_type = other DNA
ggatagagaaaggagtcatatt

SEQ ID NO: 62457 - DNA, 22 bp, synthetic construct
  misc_feature 1..22: note = chemically synthesized
  source 1..22: mol_type = other DNA
accctctaggaattaaaagtaa

SEQ ID NO: 62458 - DNA, 22 bp, synthetic construct
  misc_feature 1..22: note = chemically synthesized
  source 1..22: mol_type = other DNA
ccctctaggaattaaaagtaac

SEQ ID NO: 62459 - DNA, 22 bp, synthetic construct
  misc_feature 1..22: note = chemically synthesized
  source 1..22: mol_type = other DNA
taggaattaaaagtaacactgg

SEQ ID NO: 62460 - DNA, 22 bp, synthetic construct
  misc_feature 1..22: note = chemically synthesized
  source 1..22: mol_type = other DNA
ggaattaaaagtaacactggag

SEQ ID NO: 62461 - DNA, 22 bp, synthetic construct
  misc_feature 1..22: note = chemically synthesized
  source 1..22: mol_type = other DNA
aaagtaacactggagtgacctg

SEQ ID NO: 62462 - DNA, 22 bp, synthetic construct
  misc_feature 1..22: note = chemically synthesized
  source 1..22: mol_type = other DNA
gagtgacctgagagaggaatcc

SEQ ID NO: 62463 - DNA, 22 bp, synthetic construct
  misc_feature 1..22: note = chemically synthesized
  source 1..22: mol_type = other DNA
agagaggaatcctggccctccc

SEQ ID NO: 62464 - DNA, 22 bp, synthetic construct
  misc_feature 1..22: note = chemically synthesized
  source 1..22: mol_type = other DNA
gccctccccttgtcattttgcc

SEQ ID NO: 62465 - DNA, 22 bp, synthetic construct
  misc_feature 1..22: note = chemically synthesized
  source 1..22: mol_type = other DNA
cccttgtcattttgcccaagat

SEQ ID NO: 62466 - DNA, 22 bp, synthetic construct
  misc_feature 1..22: note = chemically synthesized
  source 1..22: mol_type = other DNA
gtcattttgcccaagatttcag

SEQ ID NO: 62467 - DNA, 22 bp, synthetic construct
  misc_feature 1..22: note = chemically synthesized
  source 1..22: mol_type = other DNA
tcattttgcccaagatttcaga

SEQ ID NO: 62468 - DNA, 22 bp, synthetic construct
  misc_feature 1..22: note = chemically synthesized
  source 1..22: mol_type = other DNA
tgcccaagatttcagagcctaa

SEQ ID NO: 62469 - DNA, 22 bp, synthetic construct
  misc_feature 1..22: note = chemically synthesized
  source 1..22: mol_type = other DNA
gcccaagatttcagagcctaat

SEQ ID NO: 62470 - DNA, 22 bp, synthetic construct
  misc_feature 1..22: note = chemically synthesized
  source 1..22: mol_type = other DNA
cccaagatttcagagcctaatt

SEQ ID NO: 62471 - DNA, 22 bp, synthetic construct
  misc_feature 1..22: note = chemically synthesized
  source 1..22: mol_type = other DNA
cagagcctaattgaaacataca

SEQ ID NO: 62472 - DNA, 22 bp, synthetic construct
  misc_feature 1..22: note = chemically synthesized
  source 1..22: mol_type = other DNA
agagcctaattgaaacatacaa

SEQ ID NO: 62473 - DNA, 22 bp, synthetic construct
  misc_feature 1..22: note = chemically synthesized
  source 1..22: mol_type = other DNA
attgaaacatacaaaagcacca

SEQ ID NO: 62474 - DNA, 22 bp, synthetic construct
  misc_feature 1..22: note = chemically synthesized
  source 1..22: mol_type = other DNA
aaacatacaaaagcaccaccag

SEQ ID NO: 62475 - DNA, 22 bp, synthetic construct
  misc_feature 1..22: note = chemically synthesized
  source 1..22: mol_type = other DNA
tagccttctgaagatccagtgg

SEQ ID NO: 62476 - DNA, 22 bp, synthetic construct
  misc_feature 1..22: note = chemically synthesized
  source 1..22: mol_type = other DNA
gccttctgaagatccagtgggg

SEQ ID NO: 62477 - DNA, 22 bp, synthetic construct
  misc_feature 1..22: note = chemically synthesized
  source 1..22: mol_type = other DNA
ctgaagatccagtggggtggat

SEQ ID NO: 62478 - DNA, 22 bp, synthetic construct
  misc_feature 1..22: note = chemically synthesized
  source 1..22: mol_type = other DNA
tgaagatccagtggggtggatg

SEQ ID NO: 62479 - DNA, 22 bp, synthetic construct
  misc_feature 1..22: note = chemically synthesized
  source 1..22: mol_type = other DNA
aagatccagtggggtggatgtg

SEQ ID NO: 62480 - DNA, 22 bp, synthetic construct
  misc_feature 1..22: note = chemically synthesized
  source 1..22: mol_type = other DNA
gaaaaagcagagctgggcttat

SEQ ID NO: 62481 - DNA, 22 bp, synthetic construct
  misc_feature 1..22: note = chemically synthesized
  source 1..22: mol_type = other DNA
ggcttataaggaggatgatgta

SEQ ID NO: 62482 - DNA, 22 bp, synthetic construct
  misc_feature 1..22: note = chemically synthesized
  source 1..22: mol_type = other DNA
ataaggaggatgatgtaatgtg

SEQ ID NO: 62483 - DNA, 22 bp, synthetic construct
  misc_feature 1..22: note = chemically synthesized
  source 1..22: mol_type = other DNA
taaggaggatgatgtaatgtga

SEQ ID NO: 62484 - DNA, 22 bp, synthetic construct
  misc_feature 1..22: note = chemically synthesized
  source 1..22: mol_type = other DNA
tacctgaatgttttgacctagt

SEQ ID NO: 62485 - DNA, 22 bp, synthetic construct
  misc_feature 1..22: note = chemically synthesized
  source 1..22: mol_type = other DNA
aatgttttgacctagtgcaata

SEQ ID NO: 62486 - DNA, 22 bp, synthetic construct
  misc_feature 1..22: note = chemically synthesized
  source 1..22: mol_type = other DNA
tgacctagtgcaatatctgggt

SEQ ID NO: 62487 - DNA, 22 bp, synthetic construct
  misc_feature 1..22: note = chemically synthesized
  source 1..22: mol_type = other DNA
gacctagtgcaatatctgggtc

SEQ ID NO: 62488 - DNA, 22 bp, synthetic construct
  misc_feature 1..22: note = chemically synthesized
  source 1..22: mol_type = other DNA
acctagtgcaatatctgggtca

SEQ ID NO: 62489 - DNA, 22 bp, synthetic construct
  misc_feature 1..22: note = chemically synthesized
  source 1..22: mol_type = other DNA
gtgcaatatctgggtcactgca

SEQ ID NO: 62490 - DNA, 22 bp, synthetic construct
  misc_feature 1..22: note = chemically synthesized
  source 1..22: mol_type = other DNA
ggtcactgcagccattcagaaa

SEQ ID NO: 62491 - DNA, 22 bp, synthetic construct
  misc_feature 1..22: note = chemically synthesized
  source 1..22: mol_type = other DNA
cagccattcagaaatccaagga

SEQ ID NO: 62492 - DNA, 22 bp, synthetic construct
  misc_feature 1..22: note = chemically synthesized
  source 1..22: mol_type = other DNA
agaaatccaaggaaatacgatg

SEQ ID NO: 62493 - DNA, 22 bp, synthetic construct
  misc_feature 1..22: note = chemically synthesized
  source 1..22: mol_type = other DNA
gaagcagaattaccccactaac

SEQ ID NO: 62494 - DNA, 22 bp, synthetic construct
  misc_feature 1..22: note = chemically synthesized
  source 1..22: mol_type = other DNA
ccccactaaccatctattaatt

SEQ ID NO: 62495 - DNA, 22 bp, synthetic construct
  misc_feature 1..22: note = chemically synthesized
  source 1..22: mol_type = other DNA
accatctattaattatacttaa

SEQ ID NO: 62496 - DNA, 22 bp, synthetic construct
  misc_feature 1..22: note = chemically synthesized
  source 1..22: mol_type = other DNA
ttaattatacttaagctggtcc

SEQ ID NO: 62497 - DNA, 22 bp, synthetic construct
  misc_feature 1..22: note = chemically synthesized
  source 1..22: mol_type = other DNA
attatacttaagctggtccccc

SEQ ID NO: 62498 - DNA, 22 bp, synthetic construct
  misc_feature 1..22: note = chemically synthesized
  source 1..22: mol_type = other DNA
tacttaagctggtcccccatta

SEQ ID NO: 62499 - DNA, 22 bp, synthetic construct
  misc_feature 1..22: note = chemically synthesized
  source 1..22: mol_type = other DNA
aagctggtcccccattactgag

SEQ ID NO: 62500 - DNA, 22 bp, synthetic construct
  misc_feature 1..22: note = chemically synthesized
  source 1..22: mol_type = other DNA
agctggtcccccattactgaga

SEQ ID NO: 62501 - DNA, 22 bp, synthetic construct
  misc_feature 1..22: note = chemically synthesized
  source 1..22: mol_type = other DNA
gtcccccattactgagagtgca

SEQ ID NO: 62502 - DNA, 22 bp, synthetic construct
  misc_feature 1..22: note = chemically synthesized
  source 1..22: mol_type = other DNA
ctgagagtgcattactatataa

SEQ ID NO: 62503 - DNA, 22 bp, synthetic construct
  misc_feature 1..22: note = chemically synthesized
  source 1..22: mol_type = other DNA
agagtgcattactatataatta

SEQ ID NO: 62504 - DNA, 22 bp, synthetic construct
  misc_feature 1..22: note = chemically synthesized
  source 1..22: mol_type = other DNA
ctatataattaaagccatttag

SEQ ID NO: 62505 - DNA, 22 bp, synthetic construct
  misc_feature 1..22: note = chemically synthesized
  source 1..22: mol_type = other DNA
tataattaaagccatttagaca

SEQ ID NO: 62506 - DNA, 22 bp, synthetic construct
  misc_feature 1..22: note = chemically synthesized
  source 1..22: mol_type = other DNA
aagccatttagacatggcttgg

SEQ ID NO: 62507 - DNA, 22 bp, synthetic construct
  misc_feature 1..22: note = chemically synthesized
  source 1..22: mol_type = other DNA
agacatggcttggcatagcact

SEQ ID NO: 62508 - DNA, 22 bp, synthetic construct
  misc_feature 1..22: note = chemically synthesized
  source 1..22: mol_type = other DNA
gacatggcttggcatagcactt

SEQ ID NO: 62509 - DNA, 22 bp, synthetic construct
  misc_feature 1..22: note = chemically synthesized
  source 1..22: mol_type = other DNA
ggcatagcacttgcatgatacg

SEQ ID NO: 62510 - DNA, 22 bp, synthetic construct
  misc_feature 1..22: note = chemically synthesized
  source 1..22: mol_type = other DNA
gcatagcacttgcatgatacgc

SEQ ID NO: 62511 - DNA, 22 bp, synthetic construct
  misc_feature 1..22: note = chemically synthesized
  source 1..22: mol_type = other DNA
gcatgatacgccacatactaaa

SEQ ID NO: 62512 - DNA, 22 bp, synthetic construct
  misc_feature 1..22: note = chemically synthesized
  source 1..22: mol_type = other DNA
catgatacgccacatactaaaa

SEQ ID NO: 62513 - DNA, 22 bp, synthetic construct
  misc_feature 1..22: note = chemically synthesized
  source 1..22: mol_type = other DNA
aaaactcctccttaggcagcct

SEQ ID NO: 62514 - DNA, 22 bp, synthetic construct
  misc_feature 1..22: note = chemically synthesized
  source 1..22: mol_type = other DNA
ctccttaggcagccttcttttc

SEQ ID NO: 62515 - DNA, 22 bp, synthetic construct
  misc_feature 1..22: note = chemically synthesized
  source 1..22: mol_type = other DNA
cttaggcagccttcttttccta

SEQ ID NO: 62516 - DNA, 22 bp, synthetic construct
  misc_feature 1..22: note = chemically synthesized
  source 1..22: mol_type = other DNA
aggcagccttcttttcctatca

SEQ ID NO: 62517 - DNA, 22 bp, synthetic construct
  misc_feature 1..22: note = chemically synthesized
  source 1..22: mol_type = other DNA
ggcagccttcttttcctatcag

SEQ ID NO: 62518 - DNA, 22 bp, synthetic construct
  misc_feature 1..22: note = chemically synthesized
  source 1..22: mol_type = other DNA
cttttcctatcagattcagagc

SEQ ID NO: 62519 - DNA, 22 bp, synthetic construct
  misc_feature 1..22: note = chemically synthesized
  source 1..22: mol_type = other DNA
ttttcctatcagattcagagct

SEQ ID NO: 62520 - DNA, 22 bp, synthetic construct
  misc_feature 1..22: note = chemically synthesized
  source 1..22: mol_type = other DNA
ttcctatcagattcagagctcc

SEQ ID NO: 62521 - DNA, 22 bp, synthetic construct
  misc_feature 1..22: note = chemically synthesized
  source 1..22: mol_type = other DNA
tcctatcagattcagagctcct

SEQ ID NO: 62522 - DNA, 22 bp, synthetic construct
  misc_feature 1..22: note = chemically synthesized
  source 1..22: mol_type = other DNA
cctatcagattcagagctcctt

SEQ ID NO: 62523 - DNA, 22 bp, synthetic construct
  misc_feature 1..22: note = chemically synthesized
  source 1..22: mol_type = other DNA
ctatcagattcagagctccttt

SEQ ID NO: 62524 - DNA, 22 bp, synthetic construct
  misc_feature 1..22: note = chemically synthesized
  source 1..22: mol_type = other DNA
tcagattcagagctcctttctc

SEQ ID NO: 62525 - DNA, 22 bp, synthetic construct
  misc_feature 1..22: note = chemically synthesized
  source 1..22: mol_type = other DNA
agagctcctttctccttttctc

SEQ ID NO: 62526 - DNA, 22 bp, synthetic construct
  misc_feature 1..22: note = chemically synthesized
  source 1..22: mol_type = other DNA
ctttctccttttctcggtaaga

SEQ ID NO: 62527 - DNA, 22 bp, synthetic construct
  misc_feature 1..22: note = chemically synthesized
  source 1..22: mol_type = other DNA
tctccttttctcggtaagaatg

SEQ ID NO: 62528 - DNA, 22 bp, synthetic construct
  misc_feature 1..22: note = chemically synthesized
  source 1..22: mol_type = other DNA
ctccttttctcggtaagaatga

SEQ ID NO: 62529 - DNA, 22 bp, synthetic construct
  misc_feature 1..22: note = chemically synthesized
  source 1..22: mol_type = other DNA
tccttttctcggtaagaatgaa

SEQ ID NO: 62530 - DNA, 22 bp, synthetic construct
  misc_feature 1..22: note = chemically synthesized
  source 1..22: mol_type = other DNA
cttttctcggtaagaatgaaca

SEQ ID NO: 62531 - DNA, 22 bp, synthetic construct
  misc_feature 1..22: note = chemically synthesized
  source 1..22: mol_type = other DNA
ttctcggtaagaatgaacacag

SEQ ID NO: 62532 - DNA, 22 bp, synthetic construct
  misc_feature 1..22: note = chemically synthesized
  source 1..22: mol_type = other DNA
tctcggtaagaatgaacacagg

SEQ ID NO: 62533 - DNA, 22 bp, synthetic construct
  misc_feature 1..22: note = chemically synthesized
  source 1..22: mol_type = other DNA
ctcggtaagaatgaacacaggt

SEQ ID NO: 62534 - DNA, 22 bp, synthetic construct
  misc_feature 1..22: note = chemically synthesized
  source 1..22: mol_type = other DNA
tcggtaagaatgaacacaggta

SEQ ID NO: 62535 - DNA, 22 bp, synthetic construct
  misc_feature 1..22: note = chemically synthesized
  source 1..22: mol_type = other DNA
ggtaagaatgaacacaggtaga

SEQ ID NO: 62536 - DNA, 22 bp, synthetic construct
  misc_feature 1..22: note = chemically synthesized
  source 1..22: mol_type = other DNA
tcagttaggatctccagcctgg

SEQ ID NO: 62537 - DNA, 22 bp, synthetic construct
  misc_feature 1..22: note = chemically synthesized
  source 1..22: mol_type = other DNA
agttaggatctccagcctgggc

SEQ ID NO: 62538 - DNA, 22 bp, synthetic construct
  misc_feature 1..22: note = chemically synthesized
  source 1..22: mol_type = other DNA
ggatctccagcctgggcttgtg

SEQ ID NO: 62539 - DNA, 22 bp, synthetic construct
  misc_feature 1..22: note = chemically synthesized
  source 1..22: mol_type = other DNA
cagcctgggcttgtgagctggc

SEQ ID NO: 62540 - DNA, 22 bp, synthetic construct
  misc_feature 1..22: note = chemically synthesized
  source 1..22: mol_type = other DNA
ggcttgtgagctggccctacct

SEQ ID NO: 62541 - DNA, 22 bp, synthetic construct
  misc_feature 1..22: note = chemically synthesized
  source 1..22: mol_type = other DNA
gtgagctggccctacctggaag

SEQ ID NO: 62542 - DNA, 22 bp, synthetic construct
  misc_feature 1..22: note = chemically synthesized
  source 1..22: mol_type = other DNA
tgagctggccctacctggaagt

SEQ ID NO: 62543 - DNA, 22 bp, synthetic construct
  misc_feature 1..22: note = chemically synthesized
  source 1..22: mol_type = other DNA
gccctacctggaagtcttgctt

SEQ ID NO: 62544 - DNA, 22 bp, synthetic construct
  misc_feature 1..22: note = chemically synthesized
  source 1..22: mol_type = other DNA
cctggaagtcttgcttttgtat

SEQ ID NO: 62545 - DNA, 22 bp, synthetic construct
  misc_feature 1..22: note = chemically synthesized
  source 1..22: mol_type = other DNA
gaagtcttgcttttgtatatgt

SEQ ID NO: 62546 - DNA, 22 bp, synthetic construct
  misc_feature 1..22: note = chemically synthesized
  source 1..22: mol_type = other DNA
gcttttgtatatgtgacggaag

SEQ ID NO: 62547 - DNA, 22 bp, synthetic construct
  misc_feature 1..22: note = chemically synthesized
  source 1..22: mol_type = other DNA
cttttgtatatgtgacggaaga

SEQ ID NO: 62548 - DNA, 22 bp, synthetic construct
  misc_feature 1..22: note = chemically synthesized
  source 1..22: mol_type = other DNA
ttgtatatgtgacggaagaata

SEQ ID NO: 62549 - DNA, 22 bp, synthetic construct
  misc_feature 1..22: note = chemically synthesized
  source 1..22: mol_type = other DNA
tgtatatgtgacggaagaataa

SEQ ID NO: 62550 - DNA, 22 bp, synthetic construct
  misc_feature 1..22: note = chemically synthesized
  source 1..22: mol_type = other DNA
gtatatgtgacggaagaataag

SEQ ID NO: 62551 - DNA, 22 bp, synthetic construct
  misc_feature 1..22: note = chemically synthesized
  source 1..22: mol_type = other DNA
tatatgtgacggaagaataagt

SEQ ID NO: 62552 - DNA, 22 bp, synthetic construct
  misc_feature 1..22: note = chemically synthesized
  source 1..22: mol_type = other DNA
caggggaaaatccagaacaacc

SEQ ID NO: 62553 - DNA, 22 bp, synthetic construct
  misc_feature 1..22: note = chemically synthesized
  source 1..22: mol_type = other DNA
aggggaaaatccagaacaaccc

SEQ ID NO: 62554 - DNA, 22 bp, synthetic construct
  misc_feature 1..22: note = chemically synthesized
  source 1..22: mol_type = other DNA
ctagcaacaggtctttctcaat

SEQ ID NO: 62555 - DNA, 22 bp, synthetic construct
  misc_feature 1..22: note = chemically synthesized
  source 1..22: mol_type = other DNA
tagcaacaggtctttctcaata

SEQ ID NO: 62556 - DNA, 22 bp, synthetic construct
  misc_feature 1..22: note = chemically synthesized
  source 1..22: mol_type = other DNA
gcaacaggtctttctcaatagc

SEQ ID NO: 62557 - DNA, 22 bp, synthetic construct
  misc_feature 1..22: note = chemically synthesized
  source 1..22: mol_type = other DNA
tctcaatagcttcattagcttt

SEQ ID NO: 62558 - DNA, 22 bp, synthetic construct
  misc_feature 1..22: note = chemically synthesized
  source 1..22: mol_type = other DNA
ctcaatagcttcattagctttt

SEQ ID NO: 62559 - DNA, 22 bp, synthetic construct
  misc_feature 1..22: note = chemically synthesized
  source 1..22: mol_type = other DNA
tcaatagcttcattagcttttc

SEQ ID NO: 62560 - DNA, 22 bp, synthetic construct
  misc_feature 1..22: note = chemically synthesized
  source 1..22: mol_type = other DNA
aatagcttcattagcttttcaa

SEQ ID NO: 62561 - DNA, 22 bp, synthetic construct
  misc_feature 1..22: note = chemically synthesized
  source 1..22: mol_type = other DNA
cattagcttttcaaaaacatta

SEQ ID NO: 62562 - DNA, 22 bp, synthetic construct
  misc_feature 1..22: note = chemically synthesized
  source 1..22: mol_type = other DNA
attagcttttcaaaaacattac

SEQ ID NO: 62563 - DNA, 22 bp, synthetic construct
  misc_feature 1..22: note = chemically synthesized
  source 1..22: mol_type = other DNA
gcttttcaaaaacattacccaa

SEQ ID NO: 62564 - DNA, 22 bp, synthetic construct
  misc_feature 1..22: note = chemically synthesized
  source 1..22: mol_type = other DNA
ttcaaaaacattacccaatatg

SEQ ID NO: 62565 - DNA, 22 bp, synthetic construct
  misc_feature 1..22: note = chemically synthesized
  source 1..22: mol_type = other DNA
tcaaaaacattacccaatatga

SEQ ID NO: 62566 - DNA, 22 bp, synthetic construct
  misc_feature 1..22: note = chemically synthesized
  source 1..22: mol_type = other DNA
caaaaacattacccaatatgat

SEQ ID NO: 62567 - DNA, 22 bp, synthetic construct
  misc_feature 1..22: note = chemically synthesized
  source 1..22: mol_type = other DNA
aaaaacattacccaatatgatt

SEQ ID NO: 62568 - DNA, 22 bp, synthetic construct
  misc_feature 1..22: note = chemically synthesized
  source 1..22: mol_type = other DNA
cccaatatgattaggattgtaa

SEQ ID NO: 62569 - DNA, 22 bp, synthetic construct
  misc_feature 1..22: note = chemically synthesized
  source 1..22: mol_type = other DNA
ggattgtaaaagaggaccacct

SEQ ID NO: 62570 - DNA, 22 bp, synthetic construct
  misc_feature 1..22: note = chemically synthesized
  source 1..22: mol_type = other DNA
taaaagaggaccacctgagctg

SEQ ID NO: 62571 - DNA, 22 bp, synthetic construct
  misc_feature 1..22: note = chemically synthesized
  source 1..22: mol_type = other DNA
agctgacagcacctctggcctc

SEQ ID NO: 62572 - DNA, 22 bp, synthetic construct
  misc_feature 1..22: note = chemically synthesized
  source 1..22: mol_type = other DNA
acagcacctctggcctcaaaat

SEQ ID NO: 62573 - DNA, 22 bp, synthetic construct
  misc_feature 1..22: note = chemically synthesized
  source 1..22: mol_type = other DNA
tggcctcaaaatgggctggcag

SEQ ID NO: 62574 - DNA, 22 bp, synthetic construct
  misc_feature 1..22: note = chemically synthesized
  source 1..22: mol_type = other DNA
gcctcaaaatgggctggcagaa

SEQ ID NO: 62575 - DNA, 22 bp, synthetic construct
  misc_feature 1..22: note = chemically synthesized
  source 1..22: mol_type = other DNA
aaaatgggctggcagaagacca

SEQ ID NO: 62576 - DNA, 22 bp, synthetic construct
  misc_feature 1..22: note = chemically synthesized
  source 1..22: mol_type = other DNA
gcagaagaccattcaaagataa

SEQ ID NO: 62577 - DNA, 22 bp, synthetic construct
  misc_feature 1..22: note = chemically synthesized
  source 1..22: mol_type = other DNA
aaagataaaatgggctgttcca

SEQ ID NO: 62578 - DNA, 22 bp, synthetic construct
  misc_feature 1..22: note = chemically synthesized
  source 1..22: mol_type = other DNA
ttccagtgggagtgagctccct

SEQ ID NO: 62579 - DNA, 22 bp, synthetic construct
  misc_feature 1..22: note = chemically synthesized
  source 1..22: mol_type = other DNA
cagtgggagtgagctccctact

SEQ ID NO: 62580 - DNA, 22 bp, synthetic construct
  misc_feature 1..22: note = chemically synthesized
  source 1..22: mol_type = other DNA
cctacttgtgagagtattcaag

SEQ ID NO: 62581 - DNA, 22 bp, synthetic construct
  misc_feature 1..22: note = chemically synthesized
  source 1..22: mol_type = other DNA
cttgtgagagtattcaagtaga

SEQ ID NO: 62582 - DNA, 22 bp, synthetic construct
  misc_feature 1..22: note = chemically synthesized
  source 1..22: mol_type = other DNA
gtgagagtattcaagtagagag

SEQ ID NO: 62583 - DNA, 22 bp, synthetic construct
  misc_feature 1..22: note = chemically synthesized
  source 1..22: mol_type = other DNA
tgagagtattcaagtagagaga

SEQ ID NO: 62584 - DNA, 22 bp, synthetic construct
  misc_feature 1..22: note = chemically synthesized
  source 1..22: mol_type = other DNA
aagtagagagaggaggacctcc

SEQ ID NO: 62585 - DNA, 22 bp, synthetic construct
  misc_feature 1..22: note = chemically synthesized
  source 1..22: mol_type = other DNA
ctggcgggaaacttgcatatgg

SEQ ID NO: 62586 - DNA, 22 bp, synthetic construct
  misc_feature 1..22: note = chemically synthesized
  source 1..22: mol_type = other DNA
gcgggaaacttgcatatggtgt

SEQ ID NO: 62587 - DNA, 22 bp, synthetic construct
  misc_feature 1..22: note = chemically synthesized
  source 1..22: mol_type = other DNA
gcatatggtgtacgtgatatgg

SEQ ID NO: 62588 - DNA, 22 bp, synthetic construct
  misc_feature 1..22: note = chemically synthesized
  source 1..22: mol_type = other DNA
catatggtgtacgtgatatggc

SEQ ID NO: 62589 - DNA, 22 bp, synthetic construct
  misc_feature 1..22: note = chemically synthesized
  source 1..22: mol_type = other DNA
catctgaaagagtctgtgctga

SEQ ID NO: 62590 - DNA, 22 bp, synthetic construct
  misc_feature 1..22: note = chemically synthesized
  source 1..22: mol_type = other DNA
aaagagtctgtgctgagggcag

SEQ ID NO: 62591 - DNA, 22 bp, synthetic construct
  misc_feature 1..22: note = chemically synthesized
  source 1..22: mol_type = other DNA
tgctgagggcaggctggagtca

SEQ ID NO: 62592 - DNA, 22 bp, synthetic construct
  misc_feature 1..22: note = chemically synthesized
  source 1..22: mol_type = other DNA
agggcaggctggagtcacacat

SEQ ID NO: 62593 - DNA, 22 bp, synthetic construct
  misc_feature 1..22: note = chemically synthesized
  source 1..22: mol_type = other DNA
gagtcacacatgggaataagcc

SEQ ID NO: 62594 - DNA, 22 bp, synthetic construct
  misc_feature 1..22: note = chemically synthesized
  source 1..22: mol_type = other DNA
caatctgccatccgtgatttaa

SEQ ID NO: 62595 - DNA, 22 bp, synthetic construct
  misc_feature 1..22: note = chemically synthesized
  source 1..22: mol_type = other DNA
ccatccgtgatttaattccacg

SEQ ID NO: 62596 - DNA, 22 bp, synthetic construct
  misc_feature 1..22: note = chemically synthesized
  source 1..22: mol_type = other DNA
aattccacgacggcagaatgga

SEQ ID NO: 62597 - DNA, 22 bp, synthetic construct
  misc_feature 1..22: note = chemically synthesized
  source 1..22: mol_type = other DNA
attccacgacggcagaatggat

SEQ ID NO: 62598 - DNA, 22 bp, synthetic construct
  misc_feature 1..22: note = chemically synthesized
  source 1..22: mol_type = other DNA
cacgacggcagaatggatggca

SEQ ID NO: 62599 - DNA, 22 bp, synthetic construct
  misc_feature 1..22: note = chemically synthesized
  source 1..22: mol_type = other DNA
gctccaaataccagtgcccatt

SEQ ID NO: 62600 - DNA, 22 bp, synthetic construct
  misc_feature 1..22: note = chemically synthesized
  source 1..22: mol_type = other DNA
ctccaaataccagtgcccattg

SEQ ID NO: 62601 - DNA, 22 bp, synthetic construct
  misc_feature 1..22: note = chemically synthesized
  source 1..22: mol_type = other DNA
caaataccagtgcccattgctt

SEQ ID NO: 62602 - DNA, 22 bp, synthetic construct
  misc_feature 1..22: note = chemically synthesized
  source 1..22: mol_type = other DNA
cttcaaatagtagtcctcctca

SEQ ID NO: 62603 - DNA, 22 bp, synthetic construct
  misc_feature 1..22: note = chemically synthesized
  source 1..22: mol_type = other DNA
caaatagtagtcctcctcaatc

SEQ ID NO: 62604 - DNA, 22 bp, synthetic construct
  misc_feature 1..22: note = chemically synthesized
  source 1..22: mol_type = other DNA
aaatagtagtcctcctcaatcc

SEQ ID NO: 62605 - DNA, 22 bp, synthetic construct
  misc_feature 1..22: note = chemically synthesized
  source 1..22: mol_type = other DNA
ctcaatccctggcatggttgtt

SEQ ID NO: 62606 - DNA, 22 bp, synthetic construct
  misc_feature 1..22: note = chemically synthesized
  source 1..22: mol_type = other DNA
aatccctggcatggttgttgac

SEQ ID NO: 62607 - DNA, 22 bp, synthetic construct
  misc_feature 1..22: note = chemically synthesized
  source 1..22: mol_type = other DNA
gcatggttgttgactttaaaca

SEQ ID NO: 62608 - DNA, 22 bp, synthetic construct
  misc_feature 1..22: note = chemically synthesized
  source 1..22: mol_type = other DNA
ttgactttaaacaccgaagact

SEQ ID NO: 62609 - DNA, 22 bp, synthetic construct
  misc_feature 1..22: note = chemically synthesized
  source 1..22: mol_type = other DNA
actttaaacaccgaagactcca

SEQ ID NO: 62610 - DNA, 22 bp, synthetic construct
  misc_feature 1..22: note = chemically synthesized
  source 1..22: mol_type = other DNA
taaacaccgaagactccacatc

SEQ ID NO: 62611 - DNA, 22 bp, synthetic construct
  misc_feature 1..22: note = chemically synthesized
  source 1..22: mol_type = other DNA
aaacaccgaagactccacatct

SEQ ID NO: 62612 - DNA, 22 bp, synthetic construct
  misc_feature 1..22: note = chemically synthesized
  source 1..22: mol_type = other DNA
aacaccgaagactccacatctc

SEQ ID NO: 62613 - DNA, 22 bp, synthetic construct
  misc_feature 1..22: note = chemically synthesized
  source 1..22: mol_type = other DNA
cacatctcttacaacgacttct

SEQ ID NO: 62614 - DNA, 22 bp, synthetic construct
  misc_feature 1..22: note = chemically synthesized
  source 1..22: mol_type = other DNA
ttacaacgacttcttgtgcggc

SEQ ID NO: 62615 - DNA, 22 bp, synthetic construct
  misc_feature 1..22: note = chemically synthesized
  source 1..22: mol_type = other DNA
acaacgacttcttgtgcggctg

SEQ ID NO: 62616 - DNA, 22 bp, synthetic construct
  misc_feature 1..22: note = chemically synthesized
  source 1..22: mol_type = other DNA
caacgacttcttgtgcggctgg

SEQ ID NO: 62617 - DNA, 22 bp, synthetic construct
  misc_feature 1..22: note = chemically synthesized
  source 1..22: mol_type = other DNA
cttgtgcggctggcccaggacc

SEQ ID NO: 62618 - DNA, 22 bp, synthetic construct
  misc_feature 1..22: note = chemically synthesized
  source 1..22: mol_type = other DNA
ttgtgcggctggcccaggacct

SEQ ID NO: 62619 - DNA, 22 bp, synthetic construct
  misc_feature 1..22: note = chemically synthesized
  source 1..22: mol_type = other DNA
gtgcggctggcccaggacctgg

SEQ ID NO: 62620 - DNA, 22 bp, synthetic construct
  misc_feature 1..22: note = chemically synthesized
  source 1..22: mol_type = other DNA
tgcggctggcccaggacctggg

SEQ ID NO: 62621 - DNA, 22 bp, synthetic construct
  misc_feature 1..22: note = chemically synthesized
  source 1..22: mol_type = other DNA
gcccaggacctgggcgaggcag

SEQ ID NO: 62622 - DNA, 22 bp, synthetic construct
  misc_feature 1..22: note = chemically synthesized
  source 1..22: mol_type = other DNA
ggcgaggcagtaggggatgaca

SEQ ID NO: 62623 - DNA, 22 bp, synthetic construct
  misc_feature 1..22: note = chemically synthesized
  source 1..22: mol_type = other DNA
acggatgccaggggcactaccg

SEQ ID NO: 62624 - DNA, 22 bp, synthetic construct
  misc_feature 1..22: note = chemically synthesized
  source 1..22: mol_type = other DNA
ccgcactcttgcagaaggacaa

SEQ ID NO: 62625 - DNA, 22 bp, synthetic construct
  misc_feature 1..22: note = chemically synthesized
  source 1..22: mol_type = other DNA
ttgcagaaggacaagacgtaga

SEQ ID NO: 62626 - DNA, 22 bp, synthetic construct
  misc_feature 1..22: note = chemically synthesized
  source 1..22: mol_type = other DNA
gcagaaggacaagacgtagaag

SEQ ID NO: 62627 - DNA, 22 bp, synthetic construct
  misc_feature 1..22: note = chemically synthesized
  source 1..22: mol_type = other DNA
cagaaggacaagacgtagaaga

SEQ ID NO: 62628 - DNA, 22 bp, synthetic construct
  misc_feature 1..22: note = chemically synthesized
  source 1..22: mol_type = other DNA
gacttgggatgggggtttcaag

SEQ ID NO: 62629 - DNA, 22 bp, synthetic construct
  misc_feature 1..22: note = chemically synthesized
  source 1..22: mol_type = other DNA
gggatgggggtttcaaggagtc

SEQ ID NO: 62630 - DNA, 22 bp, synthetic construct
  misc_feature 1..22: note = chemically synthesized
  source 1..22: mol_type = other DNA
ggatgggggtttcaaggagtca

SEQ ID NO: 62631 - DNA, 22 bp, synthetic construct
  misc_feature 1..22: note = chemically synthesized
  source 1..22: mol_type = other DNA
caaggagtcaaagacgtgcagg

SEQ ID NO: 62632 - DNA, 22 bp, synthetic construct
  misc_feature 1..22: note = chemically synthesized
  source 1..22: mol_type = other DNA
aaggagtcaaagacgtgcagga

SEQ ID NO: 62633 - DNA, 22 bp, synthetic construct
  misc_feature 1..22: note = chemically synthesized
  source 1..22: mol_type = other DNA
caatagagctgaggcggaatgg

SEQ ID NO: 62634 - DNA, 22 bp, synthetic construct
  misc_feature 1..22: note = chemically synthesized
  source 1..22: mol_type = other DNA
aggcggaatgggagccacttgc

SEQ ID NO: 62635 - DNA, 22 bp, synthetic construct
  misc_feature 1..22: note = chemically synthesized
  source 1..22: mol_type = other DNA
gctgagtttccccttgcagctc

SEQ ID NO: 62636 - DNA, 22 bp, synthetic construct
  misc_feature 1..22: note = chemically synthesized
  source 1..22: mol_type = other DNA
ctgagtttccccttgcagctct

SEQ ID NO: 62637 - DNA, 22 bp, synthetic construct
  misc_feature 1..22: note = chemically synthesized
  source 1..22: mol_type = other DNA
agtttccccttgcagctctccc

SEQ ID NO: 62638 - DNA, 22 bp, synthetic construct
  misc_feature 1..22: note = chemically synthesized
  source 1..22: mol_type = other DNA
ccccttgcagctctccctgtac

SEQ ID NO: 62639 - DNA, 22 bp, synthetic construct
  misc_feature 1..22: note = chemically synthesized
  source 1..22: mol_type = other DNA
cccttgcagctctccctgtaca

SEQ ID NO: 62640 - DNA, 22 bp, synthetic construct
  misc_feature 1..22: note = chemically synthesized
  source 1..22: mol_type = other DNA
gcagctctccctgtacatgctg

SEQ ID NO: 62641 - DNA, 22 bp, synthetic construct
  misc_feature 1..22: note = chemically synthesized
  source 1..22: mol_type = other DNA
cagctctccctgtacatgctgg

SEQ ID NO: 62642 - DNA, 22 bp, synthetic construct
  misc_feature 1..22: note = chemically synthesized
  source 1..22: mol_type = other DNA
tccctgtacatgctggagttga

SEQ ID NO: 62643 - DNA, 22 bp, synthetic construct
  misc_feature 1..22: note = chemically synthesized
  source 1..22: mol_type = other DNA
cctgtacatgctggagttgaga

SEQ ID NO: 62644 - DNA, 22 bp, synthetic construct
  misc_feature 1..22: note = chemically synthesized
  source 1..22: mol_type = other DNA
tacatgctggagttgagagcca

SEQ ID NO: 62645 - DNA, 22 bp, synthetic construct
  misc_feature 1..22: note = chemically synthesized
  source 1..22: mol_type = other DNA
gagttgagagccagccccaggc

SEQ ID NO: 62646 - DNA, 22 bp, synthetic construct
  misc_feature 1..22: note = chemically synthesized
  source 1..22: mol_type = other DNA
agagccagccccaggccaaaga

SEQ ID NO: 62647 - DNA, 22 bp, synthetic construct
  misc_feature 1..22: note = chemically synthesized
  source 1..22: mol_type = other DNA
ttgaggaggctggcaaagggtg

SEQ ID NO: 62648 - DNA, 22 bp, synthetic construct
  misc_feature 1..22: note = chemically synthesized
  source 1..22: mol_type = other DNA
gaggaggctggcaaagggtgtg

SEQ ID NO: 62649 - DNA, 22 bp, synthetic construct
  misc_feature 1..22: note = chemically synthesized
  source 1..22: mol_type = other DNA
aggaggctggcaaagggtgtgg

SEQ ID NO: 62650 - DNA, 22 bp, synthetic construct
  misc_feature 1..22: note = chemically synthesized
  source 1..22: mol_type = other DNA
gcaaagggtgtggtgtcaatgt

SEQ ID NO: 62651 - DNA, 22 bp, synthetic construct
  misc_feature 1..22: note = chemically synthesized
  source 1..22: mol_type = other DNA
tggctgctcgcaccacctctgg

SEQ ID NO: 62652 - DNA, 22 bp, synthetic construct
  misc_feature 1..22: note = chemically synthesized
  source 1..22: mol_type = other DNA
gctgctcgcaccacctctgggc

SEQ ID NO: 62653 - DNA, 22 bp, synthetic construct
  misc_feature 1..22: note = chemically synthesized
  source 1..22: mol_type = other DNA
ctcgcaccacctctgggctttc

SEQ ID NO: 62654 - DNA, 22 bp, synthetic construct
  misc_feature 1..22: note = chemically synthesized
  source 1..22: mol_type = other DNA
gcaccacctctgggctttctcc

SEQ ID NO: 62655 - DNA, 22 bp, synthetic construct
  misc_feature 1..22: note = chemically synthesized
  source 1..22: mol_type = other DNA
tgggctttctccagagtccaca

SEQ ID NO: 62656 - DNA, 22 bp, synthetic construct
  misc_feature 1..22: note = chemically synthesized
  source 1..22: mol_type = other DNA
ggctttctccagagtccacagg

SEQ ID NO: 62657 - DNA, 22 bp, synthetic construct
  misc_feature 1..22: note = chemically synthesized
  source 1..22: mol_type = other DNA
tctccagagtccacaggaggtc

SEQ ID NO: 62658 - DNA, 22 bp, synthetic construct
  misc_feature 1..22: note = chemically synthesized
  source 1..22: mol_type = other DNA
ctccagagtccacaggaggtct

SEQ ID NO: 62659 - DNA, 22 bp, synthetic construct
  misc_feature 1..22: note = chemically synthesized
  source 1..22: mol_type = other DNA
tccagagtccacaggaggtcta

SEQ ID NO: 62660 - DNA, 22 bp, synthetic construct
  misc_feature 1..22: note = chemically synthesized
  source 1..22: mol_type = other DNA
cagagtccacaggaggtctaca

SEQ ID NO: 62661 - DNA, 22 bp, synthetic construct
  misc_feature 1..22: note = chemically synthesized
  source 1..22: mol_type = other DNA
cacccagtcccttgagcagcag

SEQ ID NO: 62662 - DNA, 22 bp, synthetic construct
  misc_feature 1..22: note = chemically synthesized
  source 1..22: mol_type = other DNA
gagcagcagataaaatccgatg

SEQ ID NO: 62663 - DNA, 22 bp, synthetic construct
  misc_feature 1..22: note = chemically synthesized
  source 1..22: mol_type = other DNA
agcagcagataaaatccgatgg

SEQ ID NO: 62664 - DNA, 22 bp, synthetic construct
  misc_feature 1..22: note = chemically synthesized
  source 1..22: mol_type = other DNA
aacaggaagaaggtaatgagaa

SEQ ID NO: 62665 - DNA, 22 bp, synthetic construct
  misc_feature 1..22: note = chemically synthesized
  source 1..22: mol_type = other DNA
cttgaggctggcattatagatg

SEQ ID NO: 62666 - DNA, 22 bp, synthetic construct
  misc_feature 1..22: note = chemically synthesized
  source 1..22: mol_type = other DNA
ttgaggctggcattatagatgc

SEQ ID NO: 62667 - DNA, 22 bp, synthetic construct
  misc_feature 1..22: note = chemically synthesized
  source 1..22: mol_type = other DNA
gaggctggcattatagatgctg

SEQ ID NO: 62668 - DNA, 22 bp, synthetic construct
  misc_feature 1..22: note = chemically synthesized
  source 1..22: mol_type = other DNA
aggctggcattatagatgctgt

SEQ ID NO: 62669 - DNA, 22 bp, synthetic construct
  misc_feature 1..22: note = chemically synthesized
  source 1..22: mol_type = other DNA
gcattatagatgctgtggatgt

SEQ ID NO: 62670 - DNA, 22 bp, synthetic construct
  misc_feature 1..22: note = chemically synthesized
  source 1..22: mol_type = other DNA
tagatgctgtggatgtggctga

SEQ ID NO: 62671 - DNA, 22 bp, synthetic construct
  misc_feature 1..22: note = chemically synthesized
  source 1..22: mol_type = other DNA
tggatgtggctgaaagtttctg

SEQ ID NO: 62672 - DNA, 22 bp, synthetic construct
  misc_feature 1..22: note = chemically synthesized
  source 1..22: mol_type = other DNA
aaagtttctgcaacagcaatgc

SEQ ID NO: 62673 - DNA, 22 bp, synthetic construct
  misc_feature 1..22: note = chemically synthesized
  source 1..22: mol_type = other DNA
ctgcaacagcaatgcctgagtg

SEQ ID NO: 62674 - DNA, 22 bp, synthetic construct
  misc_feature 1..22: note = chemically synthesized
  source 1..22: mol_type = other DNA
tgcaacagcaatgcctgagtgg

SEQ ID NO: 62675 - DNA, 22 bp, synthetic construct
  misc_feature 1..22: note = chemically synthesized
  source 1..22: mol_type = other DNA
caacagcaatgcctgagtggaa

SEQ ID NO: 62676 - DNA, 22 bp, synthetic construct
  misc_feature 1..22: note = chemically synthesized
  source 1..22: mol_type = other DNA
agtggaagaaagcatgactgtg

SEQ ID NO: 62677 - DNA, 22 bp, synthetic construct
  misc_feature 1..22: note = chemically synthesized
  source 1..22: mol_type = other DNA
tgagagataggaaggatttggg

SEQ ID NO: 62678 - DNA, 22 bp, synthetic construct
  misc_feature 1..22: note = chemically synthesized
  source 1..22: mol_type = other DNA
gggacctttgctagaggtgggt

SEQ ID NO: 62679 - DNA, 22 bp, synthetic construct
  misc_feature 1..22: note = chemically synthesized
  source 1..22: mol_type = other DNA
ggacctttgctagaggtgggtt

SEQ ID NO: 62680 - DNA, 22 bp, synthetic construct
  misc_feature 1..22: note = chemically synthesized
  source 1..22: mol_type = other DNA
tgctagaggtgggtttggagga

SEQ ID NO: 62681 - DNA, 22 bp, synthetic construct
  misc_feature 1..22: note = chemically synthesized
  source 1..22: mol_type = other DNA
gctagaggtgggtttggaggag

SEQ ID NO: 62682 - DNA, 22 bp, synthetic construct
  misc_feature 1..22: note = chemically synthesized
  source 1..22: mol_type = other DNA
ctagaggtgggtttggaggagt

SEQ ID NO: 62683 - DNA, 22 bp, synthetic construct
  misc_feature 1..22: note = chemically synthesized
  source 1..22: mol_type = other DNA
gaggtgggtttggaggagtggg

SEQ ID NO: 62684 - DNA, 22 bp, synthetic construct
  misc_feature 1..22: note = chemically synthesized
  source 1..22: mol_type = other DNA
ggaggagtgggtgacatgccat

SEQ ID NO: 62685 - DNA, 22 bp, synthetic construct
  misc_feature 1..22: note = chemically synthesized
  source 1..22: mol_type = other DNA
gaggagtgggtgacatgccatc

SEQ ID NO: 62686 - DNA, 22 bp, synthetic construct
  misc_feature 1..22: note = chemically synthesized
  source 1..22: mol_type = other DNA
tgcgactgtggaattaaatcac

SEQ ID NO: 62687 - DNA, 22 bp, synthetic construct
  misc_feature 1..22: note = chemically synthesized
  source 1..22: mol_type = other DNA
cgactgtggaattaaatcacag

SEQ ID NO: 62688 - DNA, 22 bp, synthetic construct
  misc_feature 1..22: note = chemically synthesized
  source 1..22: mol_type = other DNA
tggaattaaatcacagatggca

SEQ ID NO: 62689 - DNA, 22 bp, synthetic construct
  misc_feature 1..22: note = chemically synthesized
  source 1..22: mol_type = other DNA
aatcacagatggcagatgggag

SEQ ID NO: 62690 - DNA, 22 bp, synthetic construct
  misc_feature 1..22: note = chemically synthesized
  source 1..22: mol_type = other DNA
gcttattcccatgtgtgactcc

SEQ ID NO: 62691 - DNA, 22 bp, synthetic construct
  misc_feature 1..22: note = chemically synthesized
  source 1..22: mol_type = other DNA
attcccatgtgtgactccagcc

SEQ ID NO: 62692 - DNA, 22 bp, synthetic construct
  misc_feature 1..22: note = chemically synthesized
  source 1..22: mol_type = other DNA
ttcccatgtgtgactccagcct

SEQ ID NO: 62693 - DNA, 22 bp, synthetic construct
  misc_feature 1..22: note = chemically synthesized
  source 1..22: mol_type = other DNA
ccatgtgtgactccagcctgcc

SEQ ID NO: 62694 - DNA, 22 bp, synthetic construct
  misc_feature 1..22: note = chemically synthesized
  source 1..22: mol_type = other DNA
cagcctgccctcaatatagact

SEQ ID NO: 62695 - DNA, 22 bp, synthetic construct
  misc_feature 1..22: note = chemically synthesized
  source 1..22: mol_type = other DNA
ccctcaatatagactctttcag

SEQ ID NO: 62696 - DNA, 22 bp, synthetic construct
  misc_feature 1..22: note = chemically synthesized
  source 1..22: mol_type = other DNA
aatatagactctttcagatgga

SEQ ID NO: 62697 - DNA, 22 bp, synthetic construct
  misc_feature 1..22: note = chemically synthesized
  source 1..22: mol_type = other DNA
tttcagatggaggtgccatatc

SEQ ID NO: 62698 - DNA, 22 bp, synthetic construct
  misc_feature 1..22: note = chemically synthesized
  source 1..22: mol_type = other DNA
tcagatggaggtgccatatcac

SEQ ID NO: 62699 - DNA, 22 bp, synthetic construct
  misc_feature 1..22: note = chemically synthesized
  source 1..22: mol_type = other DNA
cagatggaggtgccatatcacg

SEQ ID NO: 62700 - DNA, 22 bp, synthetic construct
  misc_feature 1..22: note = chemically synthesized
  source 1..22: mol_type = other DNA
agatggaggtgccatatcacgt

SEQ ID NO: 62701 - DNA, 22 bp, synthetic construct
  misc_feature 1..22: note = chemically synthesized
  source 1..22: mol_type = other DNA
ccaccgtatgcaaatttcctac

SEQ ID NO: 62702 - DNA, 22 bp, synthetic construct
  misc_feature 1..22: note = chemically synthesized
  source 1..22: mol_type = other DNA
cctaccaggaggtcctcctatc

SEQ ID NO: 62703 - DNA, 22 bp, synthetic construct
  misc_feature 1..22: note = chemically synthesized
  source 1..22: mol_type = other DNA
ctaccaggaggtcctcctatct

SEQ ID NO: 62704 - DNA, 22 bp, synthetic construct
  misc_feature 1..22: note = chemically synthesized
  source 1..22: mol_type = other DNA
ccaggaggtcctcctatctcta

SEQ ID NO: 62705 - DNA, 22 bp, synthetic construct
  misc_feature 1..22: note = chemically synthesized
  source 1..22: mol_type = other DNA
ctatctctacttgaaataccct

SEQ ID NO: 62706 - DNA, 22 bp, synthetic construct
  misc_feature 1..22: note = chemically synthesized
  source 1..22: mol_type = other DNA
tctctacttgaaataccctcag

SEQ ID NO: 62707 - DNA, 22 bp, synthetic construct
  misc_feature 1..22: note = chemically synthesized
  source 1..22: mol_type = other DNA
tacttgaaataccctcagaggt

SEQ ID NO: 62708 - DNA, 22 bp, synthetic construct
  misc_feature 1..22: note = chemically synthesized
  source 1..22: mol_type = other DNA
cttgaaataccctcagaggtag

SEQ ID NO: 62709 - DNA, 22 bp, synthetic construct
  misc_feature 1..22: note = chemically synthesized
  source 1..22: mol_type = other DNA
gaaataccctcagaggtaggga

SEQ ID NO: 62710 - DNA, 22 bp, synthetic construct
  misc_feature 1..22: note = chemically synthesized
  source 1..22: mol_type = other DNA
aaataccctcagaggtagggag

SEQ ID NO: 62711 - DNA, 22 bp, synthetic construct
  misc_feature 1..22: note = chemically synthesized
  source 1..22: mol_type = other DNA
agaggtagggagctcaccccca

SEQ ID NO: 62712 - DNA, 22 bp, synthetic construct
  misc_feature 1..22: note = chemically synthesized
  source 1..22: mol_type = other DNA
acccccactataacagtccatt

SEQ ID NO: 62713 - DNA, 22 bp, synthetic construct
  misc_feature 1..22: note = chemically synthesized
  source 1..22: mol_type = other DNA
taacagtccattttatctttga

SEQ ID NO: 62714 - DNA, 22 bp, synthetic construct
  misc_feature 1..22: note = chemically synthesized
  source 1..22: mol_type = other DNA
tatctttgaacggaattgattg

SEQ ID NO: 62715 - DNA, 22 bp, synthetic construct
  misc_feature 1..22: note = chemically synthesized
  source 1..22: mol_type = other DNA
atctttgaacggaattgattgc

SEQ ID NO: 62716 - DNA, 22 bp, synthetic construct
  misc_feature 1..22: note = chemically synthesized
  source 1..22: mol_type = other DNA
tctttgaacggaattgattgct

SEQ ID NO: 62717 - DNA, 22 bp, synthetic construct
  misc_feature 1..22: note = chemically synthesized
  source 1..22: mol_type = other DNA
tgaacggaattgattgctgaat

SEQ ID NO: 62718 - DNA, 22 bp, synthetic construct
  misc_feature 1..22: note = chemically synthesized
  source 1..22: mol_type = other DNA
gaacggaattgattgctgaata

SEQ ID NO: 62719 - DNA, 22 bp, synthetic construct
  misc_feature 1..22: note = chemically synthesized
  source 1..22: mol_type = other DNA
aacggaattgattgctgaatag

SEQ ID NO: 62720 - DNA, 22 bp, synthetic construct
  misc_feature 1..22: note = chemically synthesized
  source 1..22: mol_type = other DNA
attgctgaatagttcttccttg

SEQ ID NO: 62721 - DNA, 22 bp, synthetic construct
  misc_feature 1..22: note = chemically synthesized
  source 1..22: mol_type = other DNA
ctgaatagttcttccttgtctg

SEQ ID NO: 62722 - DNA, 22 bp, synthetic construct
  misc_feature 1..22: note = chemically synthesized
  source 1..22: mol_type = other DNA
aatagttcttccttgtctgtgt

SEQ ID NO: 62723 - DNA, 22 bp, synthetic construct
  misc_feature 1..22: note = chemically synthesized
  source 1..22: mol_type = other DNA
ttccttgtctgtgtgaaactgg

SEQ ID NO: 62724 - DNA, 22 bp, synthetic construct
  misc_feature 1..22: note = chemically synthesized
  source 1..22: mol_type = other DNA
ccttgtctgtgtgaaactggtc

SEQ ID NO: 62725 - DNA, 22 bp, synthetic construct
  misc_feature 1..22: note = chemically synthesized
  source 1..22: mol_type = other DNA
cttgtctgtgtgaaactggtcc

SEQ ID NO: 62726 - DNA, 22 bp, synthetic construct
  misc_feature 1..22: note = chemically synthesized
  source 1..22: mol_type = other DNA
gtctgtgtgaaactggtccccc

SEQ ID NO: 62727 - DNA, 22 bp, synthetic construct
  misc_feature 1..22: note = chemically synthesized
  source 1..22: mol_type = other DNA
tctgtgtgaaactggtccccct

SEQ ID NO: 62728 - DNA, 22 bp, synthetic construct
  misc_feature 1..22: note = chemically synthesized
  source 1..22: mol_type = other DNA
tgtgaaactggtccccctctaa

SEQ ID NO: 62729 - DNA, 22 bp, synthetic construct
  misc_feature 1..22: note = chemically synthesized
  source 1..22: mol_type = other DNA
gtccccctctaatactgtctat

SEQ ID NO: 62730 - DNA, 22 bp, synthetic construct
  misc_feature 1..22: note = chemically synthesized
  source 1..22: mol_type = other DNA
taatactgtctatttttctcag

SEQ ID NO: 62731 - DNA, 22 bp, synthetic construct
  misc_feature 1..22: note = chemically synthesized
  source 1..22: mol_type = other DNA
atactgtctatttttctcagtt

SEQ ID NO: 62732 - DNA, 22 bp, synthetic construct
  misc_feature 1..22: note = chemically synthesized
  source 1..22: mol_type = other DNA
tctatttttctcagttctttct

SEQ ID NO: 62733 - DNA, 22 bp, synthetic construct
  misc_feature 1..22: note = chemically synthesized
  source 1..22: mol_type = other DNA
tttttctcagttctttctgcag

SEQ ID NO: 62734 - DNA, 22 bp, synthetic construct
  misc_feature 1..22: note = chemically synthesized
  source 1..22: mol_type = other DNA
ttctcagttctttctgcaggag

SEQ ID NO: 62735 - DNA, 22 bp, synthetic construct
  misc_feature 1..22: note = chemically synthesized
  source 1..22: mol_type = other DNA
tctcagttctttctgcaggagt

SEQ ID NO: 62736 - DNA, 22 bp, synthetic construct
  misc_feature 1..22: note = chemically synthesized
  source 1..22: mol_type = other DNA
ctcagttctttctgcaggagtt

SEQ ID NO: 62737 - DNA, 22 bp, synthetic construct
  misc_feature 1..22: note = chemically synthesized
  source 1..22: mol_type = other DNA
tcagttctttctgcaggagtta

SEQ ID NO: 62738 - DNA, 22 bp, synthetic construct
  misc_feature 1..22: note = chemically synthesized
  source 1..22: mol_type = other DNA
agttctttctgcaggagttagt

SEQ ID NO: 62739 - DNA, 22 bp, synthetic construct
  misc_feature 1..22: note = chemically synthesized
  source 1..22: mol_type = other DNA
tttctgcaggagttagtaagtg

SEQ ID NO: 62740 - DNA, 22 bp, synthetic construct
  misc_feature 1..22: note = chemically synthesized
  source 1..22: mol_type = other DNA
tctgcaggagttagtaagtgat

SEQ ID NO: 62741 - DNA, 22 bp, synthetic construct
  misc_feature 1..22: note = chemically synthesized
  source 1..22: mol_type = other DNA
ctgcaggagttagtaagtgatg

SEQ ID NO: 62742 - DNA, 22 bp, synthetic construct
  misc_feature 1..22: note = chemically synthesized
  source 1..22: mol_type = other DNA
tgcaggagttagtaagtgatga

SEQ ID NO: 62743 - DNA, 22 bp, synthetic construct
  misc_feature 1..22: note = chemically synthesized
  source 1..22: mol_type = other DNA
caggagttagtaagtgatgaat

SEQ ID NO: 62744 - DNA, 22 bp, synthetic construct
  misc_feature 1..22: note = chemically synthesized
  source 1..22: mol_type = other DNA
gtaagtgatgaatctagtccct

SEQ ID NO: 62745 - DNA, 22 bp, synthetic construct
  misc_feature 1..22: note = chemically synthesized
  source 1..22: mol_type = other DNA
gtccctctgtcacacatttgaa

SEQ ID NO: 62746 - DNA, 22 bp, synthetic construct
  misc_feature 1..22: note = chemically synthesized
  source 1..22: mol_type = other DNA
tgtcacacatttgaacacagtt

SEQ ID NO: 62747 - DNA, 22 bp, synthetic construct
  misc_feature 1..22: note = chemically synthesized
  source 1..22: mol_type = other DNA
tcacacatttgaacacagttat

SEQ ID NO: 62748 - DNA, 22 bp, synthetic construct
  misc_feature 1..22: note = chemically synthesized
  source 1..22: mol_type = other DNA
gaacacagttattctctctaac

SEQ ID NO: 62749 - DNA, 22 bp, synthetic construct
  misc_feature 1..22: note = chemically synthesized
  source 1..22: mol_type = other DNA
aacacagttattctctctaacc

SEQ ID NO: 62750 - DNA, 22 bp, synthetic construct
  misc_feature 1..22: note = chemically synthesized
  source 1..22: mol_type = other DNA
ttctctctaacctaaacattcc

SEQ ID NO: 62751 - DNA, 22 bp, synthetic construct
  misc_feature 1..22: note = chemically synthesized
  source 1..22: mol_type = other DNA
tctctaacctaaacattcccag

SEQ ID NO: 62752 - DNA, 22 bp, synthetic construct
  misc_feature 1..22: note = chemically synthesized
  source 1..22: mol_type = other DNA
tctaacctaaacattcccaggt

SEQ ID NO: 62753 - DNA, 22 bp, synthetic construct
  misc_feature 1..22: note = chemically synthesized
  source 1..22: mol_type = other DNA
taacctaaacattcccaggttt

SEQ ID NO: 62754 - DNA, 22 bp, synthetic construct
  misc_feature 1..22: note = chemically synthesized
  source 1..22: mol_type = other DNA
acctaaacattcccaggttttt

SEQ ID NO: 62755 - DNA, 22 bp, synthetic construct
  misc_feature 1..22: note = chemically synthesized
  source 1..22: mol_type = other DNA
aacattcccaggtttttcatgt

SEQ ID NO: 62756 - DNA, 22 bp, synthetic construct
  misc_feature 1..22: note = chemically synthesized
  source 1..22: mol_type = other DNA
ccaggtttttcatgtgatatgg

SEQ ID NO: 62757 - DNA, 22 bp, synthetic construct
  misc_feature 1..22: note = chemically synthesized
  source 1..22: mol_type = other DNA
ttcatgtgatatggcttccagg

SEQ ID NO: 62758 - DNA, 22 bp, synthetic construct
  misc_feature 1..22: note = chemically synthesized
  source 1..22: mol_type = other DNA
tcatgtgatatggcttccaggt

SEQ ID NO: 62759 - DNA, 22 bp, synthetic construct
  misc_feature 1..22: note = chemically synthesized
  source 1..22: mol_type = other DNA
catgtgatatggcttccaggtt

SEQ ID NO: 62760 - DNA, 22 bp, synthetic construct
  misc_feature 1..22: note = chemically synthesized
  source 1..22: mol_type = other DNA
atgtgatatggcttccaggttc

SEQ ID NO: 62761 - DNA, 22 bp, synthetic construct
  misc_feature 1..22: note = chemically synthesized
  source 1..22: mol_type = other DNA
ccaggttcttcctcaaacatgg

SEQ ID NO: 62762 - DNA, 22 bp, synthetic construct
  misc_feature 1..22: note = chemically synthesized
  source 1..22: mol_type = other DNA
caggttcttcctcaaacatgga

SEQ ID NO: 62763 - DNA, 22 bp, synthetic construct
  misc_feature 1..22: note = chemically synthesized
  source 1..22: mol_type = other DNA
ttcctcaaacatggaacccagt

SEQ ID NO: 62764 - DNA, 22 bp, synthetic construct
  misc_feature 1..22: note = chemically synthesized
  source 1..22: mol_type = other DNA
cctcaaacatggaacccagtac

SEQ ID NO: 62765 - DNA, 22 bp, synthetic construct
  misc_feature 1..22: note = chemically synthesized
  source 1..22: mol_type = other DNA
ctcaaacatggaacccagtact

SEQ ID NO: 62766 - DNA, 22 bp, synthetic construct
  misc_feature 1..22: note = chemically synthesized
  source 1..22: mol_type = other DNA
aaacatggaacccagtactaaa

SEQ ID NO: 62767 - DNA, 22 bp, synthetic construct
  misc_feature 1..22: note = chemically synthesized
  source 1..22: mol_type = other DNA
aatgctgtgttacttttgtgat

SEQ ID NO: 62768 - DNA, 22 bp, synthetic construct
  misc_feature 1..22: note = chemically synthesized
  source 1..22: mol_type = other DNA
tgttacttttgtgattaccatg

SEQ ID NO: 62769 - DNA, 22 bp, synthetic construct
  misc_feature 1..22: note = chemically synthesized
  source 1..22: mol_type = other DNA
cttttgtgattaccatgaaacc

SEQ ID NO: 62770 - DNA, 22 bp, synthetic construct
  misc_feature 1..22: note = chemically synthesized
  source 1..22: mol_type = other DNA
ttgtgattaccatgaaaccatt

SEQ ID NO: 62771 - DNA, 22 bp, synthetic construct
  misc_feature 1..22: note = chemically synthesized
  source 1..22: mol_type = other DNA
tgtgattaccatgaaaccatta

SEQ ID NO: 62772 - DNA, 22 bp, synthetic construct
  misc_feature 1..22: note = chemically synthesized
  source 1..22: mol_type = other DNA
gtgattaccatgaaaccattat

SEQ ID NO: 62773 - DNA, 22 bp, synthetic construct
  misc_feature 1..22: note = chemically synthesized
  source 1..22: mol_type = other DNA
tgattaccatgaaaccattatc

SEQ ID NO: 62774 - DNA, 22 bp, synthetic construct
  misc_feature 1..22: note = chemically synthesized
  source 1..22: mol_type = other DNA
ccatgaaaccattatctccctt

SEQ ID NO: 62775 - DNA, 22 bp, synthetic construct
  misc_feature 1..22: note = chemically synthesized
  source 1..22: mol_type = other DNA
tctcccttgttctcaacattct

SEQ ID NO: 62776 - DNA, 22 bp, synthetic construct
  misc_feature 1..22: note = chemically synthesized
  source 1..22: mol_type = other DNA
ccttgttctcaacattcttctt

SEQ ID NO: 62777 - DNA, 22 bp, synthetic construct
  misc_feature 1..22: note = chemically synthesized
  source 1..22: mol_type = other DNA
gttctcaacattcttctttgaa

SEQ ID NO: 62778 - DNA, 22 bp, synthetic construct
  misc_feature 1..22: note = chemically synthesized
  source 1..22: mol_type = other DNA
ttctcaacattcttctttgaat

SEQ ID NO: 62779 - DNA, 22 bp, synthetic construct
  misc_feature 1..22: note = chemically synthesized
  source 1..22: mol_type = other DNA
tcaacattcttctttgaatgct

SEQ ID NO: 62780 - DNA, 22 bp, synthetic construct
  misc_feature 1..22: note = chemically synthesized
  source 1..22: mol_type = other DNA
aacattcttctttgaatgctgc

SEQ ID NO: 62781 - DNA, 22 bp, synthetic construct
  misc_feature 1..22: note = chemically synthesized
  source 1..22: mol_type = other DNA
ttctttgaatgctgctatgttc

SEQ ID NO: 62782 - DNA, 22 bp, synthetic construct
  misc_feature 1..22: note = chemically synthesized
  source 1..22: mol_type = other DNA
ctttgaatgctgctatgttccg

SEQ ID NO: 62783 - DNA, 22 bp, synthetic construct
  misc_feature 1..22: note = chemically synthesized
  source 1..22: mol_type = other DNA
tttgaatgctgctatgttccgt

SEQ ID NO: 62784 - DNA, 22 bp, synthetic construct
  misc_feature 1..22: note = chemically synthesized
  source 1..22: mol_type = other DNA
tgaatgctgctatgttccgttc

SEQ ID NO: 62785 - DNA, 22 bp, synthetic construct
  misc_feature 1..22: note = chemically synthesized
  source 1..22: mol_type = other DNA
gaatgctgctatgttccgttct

SEQ ID NO: 62786 - DNA, 22 bp, synthetic construct
  misc_feature 1..22: note = chemically synthesized
  source 1..22: mol_type = other DNA
aatgctgctatgttccgttctt

SEQ ID NO: 62787 - DNA, 22 bp, synthetic construct
  misc_feature 1..22: note = chemically synthesized
  source 1..22: mol_type = other DNA
ctatgttccgttcttacaaatc

SEQ ID NO: 62788 - DNA, 22 bp, synthetic construct
  misc_feature 1..22: note = chemically synthesized
  source 1..22: mol_type = other DNA
tgttccgttcttacaaatctcc

SEQ ID NO: 62789 - DNA, 22 bp, synthetic construct
  misc_feature 1..22: note = chemically synthesized
  source 1..22: mol_type = other DNA
cgttcttacaaatctccagggg

SEQ ID NO: 62790 - DNA, 22 bp, synthetic construct
  misc_feature 1..22: note = chemically synthesized
  source 1..22: mol_type = other DNA
ttacaaatctccaggggagaaa

SEQ ID NO: 62791 - DNA, 22 bp, synthetic construct
  misc_feature 1..22: note = chemically synthesized
  source 1..22: mol_type = other DNA
acaaatctccaggggagaaatt

SEQ ID NO: 62792 - DNA, 22 bp, synthetic construct
  misc_feature 1..22: note = chemically synthesized
  source 1..22: mol_type = other DNA
caaatctccaggggagaaattc

SEQ ID NO: 62793 - DNA, 22 bp, synthetic construct
  misc_feature 1..22: note = chemically synthesized
  source 1..22: mol_type = other DNA
caggggagaaattccacagttt

SEQ ID NO: 62794 - DNA, 22 bp, synthetic construct
  misc_feature 1..22: note = chemically synthesized
  source 1..22: mol_type = other DNA
cacagttttgttaaggtcttat

SEQ ID NO: 62795 - DNA, 22 bp, synthetic construct
  misc_feature 1..22: note = chemically synthesized
  source 1..22: mol_type = other DNA
tgttaaggtcttatattccagt

SEQ ID NO: 62796 - DNA, 22 bp, synthetic construct
  misc_feature 1..22: note = chemically synthesized
  source 1..22: mol_type = other DNA
gttaaggtcttatattccagtg

SEQ ID NO: 62797 - DNA, 22 bp, synthetic construct
  misc_feature 1..22: note = chemically synthesized
  source 1..22: mol_type = other DNA
ttaaggtcttatattccagtgc

SEQ ID NO: 62798 - DNA, 22 bp, synthetic construct
  misc_feature 1..22: note = chemically synthesized
  source 1..22: mol_type = other DNA
aggtcttatattccagtgcctc

SEQ ID NO: 62799 - DNA, 22 bp, synthetic construct
  misc_feature 1..22: note = chemically synthesized
  source 1..22: mol_type = other DNA
atattccagtgcctcccacaaa

SEQ ID NO: 62800 - DNA, 22 bp, synthetic construct
  misc_feature 1..22: note = chemically synthesized
  source 1..22: mol_type = other DNA
tattccagtgcctcccacaaaa

SEQ ID NO: 62801 - DNA, 22 bp, synthetic construct
  misc_feature 1..22: note = chemically synthesized
  source 1..22: mol_type = other DNA
cagtgcctcccacaaaatcttt

SEQ ID NO: 62802 - DNA, 22 bp, synthetic construct
  misc_feature 1..22: note = chemically synthesized
  source 1..22: mol_type = other DNA
ccacaaaatctttcttatgctt

SEQ ID NO: 62803 - DNA, 22 bp, synthetic construct
  misc_feature 1..22: note = chemically synthesized
  source 1..22: mol_type = other DNA
tcttatgcttaacttaaatctt

SEQ ID NO: 62804 - DNA, 22 bp, synthetic construct
  misc_feature 1..22: note = chemically synthesized
  source 1..22: mol_type = other DNA
cttatgcttaacttaaatcttg

SEQ ID NO: 62805 - DNA, 22 bp, synthetic construct
  misc_feature 1..22: note = chemically synthesized
  source 1..22: mol_type = other DNA
ttatgcttaacttaaatcttgt

SEQ ID NO: 62806 - DNA, 22 bp, synthetic construct
  misc_feature 1..22: note = chemically synthesized
  source 1..22: mol_type = other DNA
atgcttaacttaaatcttgtct

SEQ ID NO: 62807 - DNA, 22 bp, synthetic construct
  misc_feature 1..22: note = chemically synthesized
  source 1..22: mol_type = other DNA
tgcttaacttaaatcttgtctt

SEQ ID NO: 62808 - DNA, 22 bp, synthetic construct
  misc_feature 1..22: note = chemically synthesized
  source 1..22: mol_type = other DNA
aacttaaatcttgtcttaccct

SEQ ID NO: 62809 - DNA, 22 bp, synthetic construct
  misc_feature 1..22: note = chemically synthesized
  source 1..22: mol_type = other DNA
acttaaatcttgtcttaccctt

SEQ ID NO: 62810 - DNA, 22 bp, synthetic construct
  misc_feature 1..22: note = chemically synthesized
  source 1..22: mol_type = other DNA
aaatcttgtcttacccttgtta

SEQ ID NO: 62811 - DNA, 22 bp, synthetic construct
  misc_feature 1..22: note = chemically synthesized
  source 1..22: mol_type = other DNA
aatcttgtcttacccttgttaa

SEQ ID NO: 62812 - DNA, 22 bp, synthetic construct
  misc_feature 1..22: note = chemically synthesized
  source 1..22: mol_type = other DNA
gtcttacccttgttaattggat

SEQ ID NO: 62813 - DNA, 22 bp, synthetic construct
  misc_feature 1..22: note = chemically synthesized
  source 1..22: mol_type = other DNA
tcttacccttgttaattggatc

SEQ ID NO: 62814 - DNA, 22 bp, synthetic construct
  misc_feature 1..22: note = chemically synthesized
  source 1..22: mol_type = other DNA
acccttgttaattggatctaag

SEQ ID NO: 62815 - DNA, 22 bp, synthetic construct
  misc_feature 1..22: note = chemically synthesized
  source 1..22: mol_type = other DNA
cccttgttaattggatctaaga

SEQ ID NO: 62816 - DNA, 22 bp, synthetic construct
  misc_feature 1..22: note = chemically synthesized
  source 1..22: mol_type = other DNA
gttaattggatctaagaaaaca

SEQ ID NO: 62817 - DNA, 22 bp, synthetic construct
  misc_feature 1..22: note = chemically synthesized
  source 1..22: mol_type = other DNA
ttaattggatctaagaaaacac

SEQ ID NO: 62818 - DNA, 22 bp, synthetic construct
  misc_feature 1..22: note = chemically synthesized
  source 1..22: mol_type = other DNA
attggatctaagaaaacacata

SEQ ID NO: 62819 - DNA, 22 bp, synthetic construct
  misc_feature 1..22: note = chemically synthesized
  source 1..22: mol_type = other DNA
gatctaagaaaacacatattca

SEQ ID NO: 62820 - DNA, 22 bp, synthetic construct
  misc_feature 1..22: note = chemically synthesized
  source 1..22: mol_type = other DNA
agaaaacacatattcaggcagg

SEQ ID NO: 62821 - DNA, 22 bp, synthetic construct
  misc_feature 1..22: note = chemically synthesized
  source 1..22: mol_type = other DNA
aggcagggtgcggtggctcacc

SEQ ID NO: 62822 - DNA, 22 bp, synthetic construct
  misc_feature 1..22: note = chemically synthesized
  source 1..22: mol_type = other DNA
acccttgtaatcccagcgcttt

SEQ ID NO: 62823 - DNA, 22 bp, synthetic construct
  misc_feature 1..22: note = chemically synthesized
  source 1..22: mol_type = other DNA
gtaatcccagcgctttgggagg

SEQ ID NO: 62824 - DNA, 22 bp, synthetic construct
  misc_feature 1..22: note = chemically synthesized
  source 1..22: mol_type = other DNA
taatcccagcgctttgggaggc

SEQ ID NO: 62825 - DNA, 22 bp, synthetic construct
  misc_feature 1..22: note = chemically synthesized
  source 1..22: mol_type = other DNA
tgggaggccgaggcgggcggat

SEQ ID NO: 62826 - DNA, 22 bp, synthetic construct
  misc_feature 1..22: note = chemically synthesized
  source 1..22: mol_type = other DNA
gggaggccgaggcgggcggatc

SEQ ID NO: 62827 - DNA, 22 bp, synthetic construct
  misc_feature 1..22: note = chemically synthesized
  source 1..22: mol_type = other DNA
ggaggccgaggcgggcggatca

SEQ ID NO: 62828 - DNA, 22 bp, synthetic construct
  misc_feature 1..22: note = chemically synthesized
  source 1..22: mol_type = other DNA
tgctaaaaatacaaaaaattag

SEQ ID NO: 62829 - DNA, 22 bp, synthetic construct
  misc_feature 1..22: note = chemically synthesized
  source 1..22: mol_type = other DNA
ctaaaaatacaaaaaattagcc

SEQ ID NO: 62830 - DNA, 22 bp, synthetic construct
  misc_feature 1..22: note = chemically synthesized
  source 1..22: mol_type = other DNA
aaaatacaaaaaattagccggg

SEQ ID NO: 62831 - DNA, 22 bp, synthetic construct
  misc_feature 1..22: note = chemically synthesized
  source 1..22: mol_type = other DNA
gccgggcatggtggcgggcgcc

SEQ ID NO: 62832 - DNA, 22 bp, synthetic construct
  misc_feature 1..22: note = chemically synthesized
  source 1..22: mol_type = other DNA
tagtcccagctactcggagagg

SEQ ID NO: 62833 - DNA, 22 bp, synthetic construct
  misc_feature 1..22: note = chemically synthesized
  source 1..22: mol_type = other DNA
ctcggagaggctgaggcaggag

SEQ ID NO: 62834 - DNA, 22 bp, synthetic construct
  misc_feature 1..22: note = chemically synthesized
  source 1..22: mol_type = other DNA
ggagaggctgaggcaggagaat

SEQ ID NO: 62835 - DNA, 22 bp, synthetic construct
  misc_feature 1..22: note = chemically synthesized
  source 1..22: mol_type = other DNA
aggcaggagaatggcgtgaacc

SEQ ID NO: 62836 - DNA, 22 bp, synthetic construct
  misc_feature 1..22: note = chemically synthesized
  source 1..22: mol_type = other DNA
gcagtgagccgagatcgcacca

SEQ ID NO: 62837 - DNA, 22 bp, synthetic construct
  misc_feature 1..22: note = chemically synthesized
  source 1..22: mol_type = other DNA
cagtgagccgagatcgcaccac

SEQ ID NO: 62838 - DNA, 22 bp, synthetic construct
  misc_feature 1..22: note = chemically synthesized
  source 1..22: mol_type = other DNA
cactctagcctgggtcacagag

SEQ ID NO: 62839 - DNA, 22 bp, synthetic construct
  misc_feature 1..22: note = chemically synthesized
  source 1..22: mol_type = other DNA
tagcctgggtcacagagcgaga

SEQ ID NO: 62840 - DNA, 22 bp, synthetic construct
  misc_feature 1..22: note = chemically synthesized
  source 1..22: mol_type = other DNA
gcctgggtcacagagcgagact

SEQ ID NO: 62841 - DNA, 22 bp, synthetic construct
  misc_feature 1..22: note = chemically synthesized
  source 1..22: mol_type = other DNA
ggtcacagagcgagactccatc

SEQ ID NO: 62842 - DNA, 22 bp, synthetic construct
  misc_feature 1..22: note = chemically synthesized
  source 1..22: mol_type = other DNA
catctcaaaaaaaaaaaacaaa

SEQ ID NO: 62843 - DNA, 22 bp, synthetic construct
  misc_feature 1..22: note = chemically synthesized
  source 1..22: mol_type = other DNA
aaaaaaaaaaaacaaaaaaaaa

SEQ ID NO: 62844 - DNA, 22 bp, synthetic construct
  misc_feature 1..22: note = chemically synthesized
  source 1..22: mol_type = other DNA
aaaactctgaacctataaaaga

SEQ ID NO: 62845 - DNA, 22 bp, synthetic construct
  misc_feature 1..22: note = chemically synthesized
  source 1..22: mol_type = other DNA
tgaacctataaaagagatcaac

SEQ ID NO: 62846 - DNA, 22 bp, synthetic construct
  misc_feature 1..22: note = chemically synthesized
  source 1..22: mol_type = other DNA
aacctataaaagagatcaactg

SEQ ID NO: 62847 - DNA, 22 bp, synthetic construct
  misc_feature 1..22: note = chemically synthesized
  source 1..22: mol_type = other DNA
taaaagagatcaactgcagtta

SEQ ID NO: 62848 - DNA, 22 bp, synthetic construct
  misc_feature 1..22: note = chemically synthesized
  source 1..22: mol_type = other DNA
cagttatctattaggtttgcaa

SEQ ID NO: 62849 - DNA, 22 bp, synthetic construct
  misc_feature 1..22: note = chemically synthesized
  source 1..22: mol_type = other DNA
tctattaggtttgcaaatgaat

SEQ ID NO: 62850 - DNA, 22 bp, synthetic construct
  misc_feature 1..22: note = chemically synthesized
  source 1..22: mol_type = other DNA
ttaggtttgcaaatgaatgtat

SEQ ID NO: 62851 - DNA, 22 bp, synthetic construct
  misc_feature 1..22: note = chemically synthesized
  source 1..22: mol_type = other DNA
ggtttgcaaatgaatgtattta

SEQ ID NO: 62852 - DNA, 22 bp, synthetic construct
  misc_feature 1..22: note = chemically synthesized
  source 1..22: mol_type = other DNA
gcaaatgaatgtatttaaatga

SEQ ID NO: 62853 - DNA, 22 bp, synthetic construct
  misc_feature 1..22: note = chemically synthesized
  source 1..22: mol_type = other DNA
caaatgaatgtatttaaatgaa

SEQ ID NO: 62854 - DNA, 22 bp, synthetic construct
  misc_feature 1..22: note = chemically synthesized
  source 1..22: mol_type = other DNA
aaatgaacagctttcctaggac

SEQ ID NO: 62855 - DNA, 22 bp, synthetic construct
  misc_feature 1..22: note = chemically synthesized
  source 1..22: mol_type = other DNA
aatgaacagctttcctaggaca

SEQ ID NO: 62856 - DNA, 22 bp, synthetic construct
  misc_feature 1..22: note = chemically synthesized
  source 1..22: mol_type = other DNA
tcctaggacatcgtgttaattt

SEQ ID NO: 62857 - DNA, 22 bp, synthetic construct
  misc_feature 1..22: note = chemically synthesized
  source 1..22: mol_type = other DNA
cctaggacatcgtgttaatttg

SEQ ID NO: 62858 - DNA, 22 bp, synthetic construct
  misc_feature 1..22: note = chemically synthesized
  source 1..22: mol_type = other DNA
ctaggacatcgtgttaatttgt

SEQ ID NO: 62859 - DNA, 22 bp, synthetic construct
  misc_feature 1..22: note = chemically synthesized
  source 1..22: mol_type = other DNA
ggacatcgtgttaatttgttaa

SEQ ID NO: 62860 - DNA, 22 bp, synthetic construct
  misc_feature 1..22: note = chemically synthesized
  source 1..22: mol_type = other DNA
atttgttaaatttggcagattc

SEQ ID NO: 62861 - DNA, 22 bp, synthetic construct
  misc_feature 1..22: note = chemically synthesized
  source 1..22: mol_type = other DNA
gttaaatttggcagattccctg

SEQ ID NO: 62862 - DNA, 22 bp, synthetic construct
  misc_feature 1..22: note = chemically synthesized
  source 1..22: mol_type = other DNA
ttaaatttggcagattccctga

SEQ ID NO: 62863 - DNA, 22 bp, synthetic construct
  misc_feature 1..22: note = chemically synthesized
  source 1..22: mol_type = other DNA
aatttggcagattccctgaaaa

SEQ ID NO: 62864 - DNA, 22 bp, synthetic construct
  misc_feature 1..22: note = chemically synthesized
  source 1..22: mol_type = other DNA
ggcagattccctgaaaagtaaa

SEQ ID NO: 62865 - DNA, 22 bp, synthetic construct
  misc_feature 1..22: note = chemically synthesized
  source 1..22: mol_type = other DNA
gcagattccctgaaaagtaaat

SEQ ID NO: 62866 - DNA, 22 bp, synthetic construct
  misc_feature 1..22: note = chemically synthesized
  source 1..22: mol_type = other DNA
cctgaaaagtaaattagggcct

SEQ ID NO: 62867 - DNA, 22 bp, synthetic construct
  misc_feature 1..22: note = chemically synthesized
  source 1..22: mol_type = other DNA
aaaagtaaattagggcctgttg

SEQ ID NO: 62868 - DNA, 22 bp, synthetic construct
  misc_feature 1..22: note = chemically synthesized
  source 1..22: mol_type = other DNA
gggcctgttgaagaccagtaag

SEQ ID NO: 62869 - DNA, 22 bp, synthetic construct
  misc_feature 1..22: note = chemically synthesized
  source 1..22: mol_type = other DNA
ttgaagaccagtaagaaataaa

SEQ ID NO: 62870 - DNA, 22 bp, synthetic construct
  misc_feature 1..22: note = chemically synthesized
  source 1..22: mol_type = other DNA
aagaccagtaagaaataaagat

SEQ ID NO: 62871 - DNA, 22 bp, synthetic construct
  misc_feature 1..22: note = chemically synthesized
  source 1..22: mol_type = other DNA
taaaaagctctgagatttcaag

SEQ ID NO: 62872 - DNA, 22 bp, synthetic construct
  misc_feature 1..22: note = chemically synthesized
  source 1..22: mol_type = other DNA
tgagatttcaagctaattcaat

SEQ ID NO: 62873 - DNA, 22 bp, synthetic construct
  misc_feature 1..22: note = chemically synthesized
  source 1..22: mol_type = other DNA
agatttcaagctaattcaattt

SEQ ID NO: 62874 - DNA, 22 bp, synthetic construct
  misc_feature 1..22: note = chemically synthesized
  source 1..22: mol_type = other DNA
caagctaattcaatttggtgcg

SEQ ID NO: 62875 - DNA, 22 bp, synthetic construct
  misc_feature 1..22: note = chemically synthesized
  source 1..22: mol_type = other DNA
aagctaattcaatttggtgcgt

SEQ ID NO: 62876 - DNA, 22 bp, synthetic construct
  misc_feature 1..22: note = chemically synthesized
  source 1..22: mol_type = other DNA
attcaatttggtgcgttaattt

SEQ ID NO: 62877 - DNA, 22 bp, synthetic construct
  misc_feature 1..22: note = chemically synthesized
  source 1..22: mol_type = other DNA
aatttggtgcgttaatttgatg

SEQ ID NO: 62878 - DNA, 22 bp, synthetic construct
  misc_feature 1..22: note = chemically synthesized
  source 1..22: mol_type = other DNA
ggtgcgttaatttgatgtatgg

SEQ ID NO: 62879 - DNA, 22 bp, synthetic construct
  misc_feature 1..22: note = chemically synthesized
  source 1..22: mol_type = other DNA
gtgcgttaatttgatgtatggt

SEQ ID NO: 62880 - DNA, 22 bp, synthetic construct
  misc_feature 1..22: note = chemically synthesized
  source 1..22: mol_type = other DNA
atttgatgtatggtaacttcta

SEQ ID NO: 62881 - DNA, 22 bp, synthetic construct
  misc_feature 1..22: note = chemically synthesized
  source 1..22: mol_type = other DNA
gatgtatggtaacttctacaca

SEQ ID NO: 62882 - DNA, 22 bp, synthetic construct
  misc_feature 1..22: note = chemically synthesized
  source 1..22: mol_type = other DNA
atgtatggtaacttctacacaa

SEQ ID NO: 62883 - DNA, 22 bp, synthetic construct
  misc_feature 1..22: note = chemically synthesized
  source 1..22: mol_type = other DNA
ctacacaattcattctatagat

SEQ ID NO: 62884 - DNA, 22 bp, synthetic construct
  misc_feature 1..22: note = chemically synthesized
  source 1..22: mol_type = other DNA
tacacaattcattctatagatc

SEQ ID NO: 62885 - DNA, 22 bp, synthetic construct
  misc_feature 1..22: note = chemically synthesized
  source 1..22: mol_type = other DNA
cacaattcattctatagatctg

SEQ ID NO: 62886 - DNA, 22 bp, synthetic construct
  misc_feature 1..22: note = chemically synthesized
  source 1..22: mol_type = other DNA
attctatagatctgggcactct

SEQ ID NO: 62887 - DNA, 22 bp, synthetic construct
  misc_feature 1..22: note = chemically synthesized
  source 1..22: mol_type = other DNA
tatagatctgggcactcttata

SEQ ID NO: 62888 - DNA, 22 bp, synthetic construct
  misc_feature 1..22: note = chemically synthesized
  source 1..22: mol_type = other DNA
tagatctgggcactcttataga

SEQ ID NO: 62889 - DNA, 22 bp, synthetic construct
  misc_feature 1..22: note = chemically synthesized
  source 1..22: mol_type = other DNA
ggcactcttatagaaattaatc

SEQ ID NO: 62890 - DNA, 22 bp, synthetic construct
  misc_feature 1..22: note = chemically synthesized
  source 1..22: mol_type = other DNA
ttatagaaattaatcatttcaa

SEQ ID NO: 62891 - DNA, 22 bp, synthetic construct
  misc_feature 1..22: note = chemically synthesized
  source 1..22: mol_type = other DNA
atagaaattaatcatttcaagt

SEQ ID NO: 62892 - DNA, 22 bp, synthetic construct
  misc_feature 1..22: note = chemically synthesized
  source 1..22: mol_type = other DNA
tagaaattaatcatttcaagtt

SEQ ID NO: 62893 - DNA, 22 bp, synthetic construct
  misc_feature 1..22: note = chemically synthesized
  source 1..22: mol_type = other DNA
atcatttcaagttgctcattct

SEQ ID NO: 62894 - DNA, 22 bp, synthetic construct
  misc_feature 1..22: note = chemically synthesized
  source 1..22: mol_type = other DNA
caagttgctcattcttgacttt

SEQ ID NO: 62895 - DNA, 22 bp, synthetic construct
  misc_feature 1..22: note = chemically synthesized
  source 1..22: mol_type = other DNA
aagttgctcattcttgactttc

SEQ ID NO: 62896 - DNA, 22 bp, synthetic construct
  misc_feature 1..22: note = chemically synthesized
  source 1..22: mol_type = other DNA
ctcattcttgactttcaaccca

SEQ ID NO: 62897 - DNA, 22 bp, synthetic construct
  misc_feature 1..22: note = chemically synthesized
  source 1..22: mol_type = other DNA
attcttgactttcaacccacag

SEQ ID NO: 62898 - DNA, 22 bp, synthetic construct
  misc_feature 1..22: note = chemically synthesized
  source 1..22: mol_type = other DNA
ttgactttcaacccacagaaat

SEQ ID NO: 62899 - DNA, 22 bp, synthetic construct
  misc_feature 1..22: note = chemically synthesized
  source 1..22: mol_type = other DNA
gactttcaacccacagaaatgc

SEQ ID NO: 62900 - DNA, 22 bp, synthetic construct
  misc_feature 1..22: note = chemically synthesized
  source 1..22: mol_type = other DNA
actttcaacccacagaaatgct

SEQ ID NO: 62901 - DNA, 22 bp, synthetic construct
  misc_feature 1..22: note = chemically synthesized
  source 1..22: mol_type = other DNA
tcaacccacagaaatgctaaca

SEQ ID NO: 62902 - DNA, 22 bp, synthetic construct
  misc_feature 1..22: note = chemically synthesized
  source 1..22: mol_type = other DNA
caacccacagaaatgctaacag

SEQ ID NO: 62903 - DNA, 22 bp, synthetic construct
  misc_feature 1..22: note = chemically synthesized
  source 1..22: mol_type = other DNA
aacccacagaaatgctaacagt

SEQ ID NO: 62904 - DNA, 22 bp, synthetic construct
  misc_feature 1..22: note = chemically synthesized
  source 1..22: mol_type = other DNA
acagtactgattacacacagga

SEQ ID NO: 62905 - DNA, 22 bp, synthetic construct
  misc_feature 1..22: note = chemically synthesized
  source 1..22: mol_type = other DNA
attacacacaggatgtggctgg

SEQ ID NO: 62906 - DNA, 22 bp, synthetic construct
  misc_feature 1..22: note = chemically synthesized
  source 1..22: mol_type = other DNA
cacacaggatgtggctggaatg

SEQ ID NO: 62907 - DNA, 22 bp, synthetic construct
  misc_feature 1..22: note = chemically synthesized
  source 1..22: mol_type = other DNA
gaatgctgggattttgtcctga

SEQ ID NO: 62908 - DNA, 22 bp, synthetic construct
  misc_feature 1..22: note = chemically synthesized
  source 1..22: mol_type = other DNA
ggattttgtcctgattagggag

SEQ ID NO: 62909 - DNA, 22 bp, synthetic construct
  misc_feature 1..22: note = chemically synthesized
  source 1..22: mol_type = other DNA
tgtcctgattagggagagaaac

SEQ ID NO: 62910 - DNA, 22 bp, synthetic construct
  misc_feature 1..22: note = chemically synthesized
  source 1..22: mol_type = other DNA
gtcctgattagggagagaaacg

SEQ ID NO: 62911 - DNA, 22 bp, synthetic construct
  misc_feature 1..22: note = chemically synthesized
  source 1..22: mol_type = other DNA
tcctgattagggagagaaacgg

SEQ ID NO: 62912 - DNA, 22 bp, synthetic construct
  misc_feature 1..22: note = chemically synthesized
  source 1..22: mol_type = other DNA
attagggagagaaacggaatgg

SEQ ID NO: 62913 - DNA, 22 bp, synthetic construct
  misc_feature 1..22: note = chemically synthesized
  source 1..22: mol_type = other DNA
gggagagaaacggaatggggtt

SEQ ID NO: 62914 - DNA, 22 bp, synthetic construct
  misc_feature 1..22: note = chemically synthesized
  source 1..22: mol_type = other DNA
gggggagaaggaagggagtcag

SEQ ID NO: 62915 - DNA, 22 bp, synthetic construct
  misc_feature 1..22: note = chemically synthesized
  source 1..22: mol_type = other DNA
ggggagaaggaagggagtcaga

SEQ ID NO: 62916 - DNA, 22 bp, synthetic construct
  misc_feature 1..22: note = chemically synthesized
  source 1..22: mol_type = other DNA
acaggactccagcaacaacttg

SEQ ID NO: 62917 - DNA, 22 bp, synthetic construct
  misc_feature 1..22: note = chemically synthesized
  source 1..22: mol_type = other DNA
cagcaacaacttgatgaggaaa

SEQ ID NO: 62918 - DNA, 22 bp, synthetic construct
  misc_feature 1..22: note = chemically synthesized
  source 1..22: mol_type = other DNA
gatgaggaaaatgagcagcaag

SEQ ID NO: 62919 - DNA, 22 bp, synthetic construct
  misc_feature 1..22: note = chemically synthesized
  source 1..22: mol_type = other DNA
atgaggaaaatgagcagcaagg

SEQ ID NO: 62920 - DNA, 22 bp, synthetic construct
  misc_feature 1..22: note = chemically synthesized
  source 1..22: mol_type = other DNA
gtgacagacagacattcagctg

SEQ ID NO: 62921 - DNA, 22 bp, synthetic construct
  misc_feature 1..22: note = chemically synthesized
  source 1..22: mol_type = other DNA
agctgcacagcccagaatccca

SEQ ID NO: 62922 - DNA, 22 bp, synthetic construct
  misc_feature 1..22: note = chemically synthesized
  source 1..22: mol_type = other DNA
cacagcccagaatcccaaccac

SEQ ID NO: 62923 - DNA, 22 bp, synthetic construct
  misc_feature 1..22: note = chemically synthesized
  source 1..22: mol_type = other DNA
aagcacctgcaacagaagaggc

SEQ ID NO: 62924 - DNA, 22 bp, synthetic construct
  misc_feature 1..22: note = chemically synthesized
  source 1..22: mol_type = other DNA
caacagaagaggcaaccataac

SEQ ID NO: 62925 - DNA, 22 bp, synthetic construct
  misc_feature 1..22: note = chemically synthesized
  source 1..22: mol_type = other DNA
cagcaaagaaaacagcccctgc

SEQ ID NO: 62926 - DNA, 22 bp, synthetic construct
  misc_feature 1..22: note = chemically synthesized
  source 1..22: mol_type = other DNA
agcaaagaaaacagcccctgca

SEQ ID NO: 62927 - DNA, 22 bp, synthetic construct
  misc_feature 1..22: note = chemically synthesized
  source 1..22: mol_type = other DNA
cagaaatgttggagcctggcaa

SEQ ID NO: 62928 - DNA, 22 bp, synthetic construct
  misc_feature 1..22: note = chemically synthesized
  source 1..22: mol_type = other DNA
gagcctggcaaacttaggtgct

SEQ ID NO: 62929 - DNA, 22 bp, synthetic construct
  misc_feature 1..22: note = chemically synthesized
  source 1..22: mol_type = other DNA
gcaaacttaggtgctctcagtg

SEQ ID NO: 62930 - DNA, 22 bp, synthetic construct
  misc_feature 1..22: note = chemically synthesized
  source 1..22: mol_type = other DNA
aggtgctctcagtggaattttt

SEQ ID NO: 62931 - DNA, 22 bp, synthetic construct
  misc_feature 1..22: note = chemically synthesized
  source 1..22: mol_type = other DNA
ggtgctctcagtggaatttttg

SEQ ID NO: 62932 - DNA, 22 bp, synthetic construct
  misc_feature 1..22: note = chemically synthesized
  source 1..22: mol_type = other DNA
tcagtggaatttttgtaaatta

SEQ ID NO: 62933 - DNA, 22 bp, synthetic construct
  misc_feature 1..22: note = chemically synthesized
  source 1..22: mol_type = other DNA
agtggaatttttgtaaattaaa

SEQ ID NO: 62934 - DNA, 22 bp, synthetic construct
  misc_feature 1..22: note = chemically synthesized
  source 1..22: mol_type = other DNA
ttgtaaattaaagccagtactc

SEQ ID NO: 62935 - DNA, 22 bp, synthetic construct
  misc_feature 1..22: note = chemically synthesized
  source 1..22: mol_type = other DNA
tgtaaattaaagccagtactca

SEQ ID NO: 62936 - DNA, 22 bp, synthetic construct
  misc_feature 1..22: note = chemically synthesized
  source 1..22: mol_type = other DNA
gtaaattaaagccagtactcaa

SEQ ID NO: 62937 - DNA, 22 bp, synthetic construct
  misc_feature 1..22: note = chemically synthesized
  source 1..22: mol_type = other DNA
taaattaaagccagtactcaaa

SEQ ID NO: 62938 - DNA, 22 bp, synthetic construct
  misc_feature 1..22: note = chemically synthesized
  source 1..22: mol_type = other DNA
aagccagtactcaaaagtccaa

SEQ ID NO: 62939 - DNA, 22 bp, synthetic construct
  misc_feature 1..22: note = chemically synthesized
  source 1..22: mol_type = other DNA
aaaagtccaaagatgcctgttg

SEQ ID NO: 62940 - DNA, 22 bp, synthetic construct
  misc_feature 1..22: note = chemically synthesized
  source 1..22: mol_type = other DNA
ttgggggctgggtgcagcggct

SEQ ID NO: 62941 - DNA, 22 bp, synthetic construct
  misc_feature 1..22: note = chemically synthesized
  source 1..22: mol_type = other DNA
ggggctgggtgcagcggctcag

SEQ ID NO: 62942 - DNA, 22 bp, synthetic construct
  misc_feature 1..22: note = chemically synthesized
  source 1..22: mol_type = other DNA
ggtgcagcggctcagacctgta

SEQ ID NO: 62943 - DNA, 22 bp, synthetic construct
  misc_feature 1..22: note = chemically synthesized
  source 1..22: mol_type = other DNA
agacctgtaatcccaatacttt

SEQ ID NO: 62944 - DNA, 22 bp, synthetic construct
  misc_feature 1..22: note = chemically synthesized
  source 1..22: mol_type = other DNA
taatcccaatactttgggaggc

SEQ ID NO: 62945 - DNA, 22 bp, synthetic construct
  misc_feature 1..22: note = chemically synthesized
  source 1..22: mol_type = other DNA
tgggaggccgaggtgagaggat

SEQ ID NO: 62946 - DNA, 22 bp, synthetic construct
  misc_feature 1..22: note = chemically synthesized
  source 1..22: mol_type = other DNA
gggaggccgaggtgagaggatc

SEQ ID NO: 62947 - DNA, 22 bp, synthetic construct
  misc_feature 1..22: note = chemically synthesized
  source 1..22: mol_type = other DNA
ggaggccgaggtgagaggatca

SEQ ID NO: 62948 - DNA, 22 bp, synthetic construct
  misc_feature 1..22: note = chemically synthesized
  source 1..22: mol_type = other DNA
gaggccaggagttcaagactag

SEQ ID NO: 62949 - DNA, 22 bp, synthetic construct
  misc_feature 1..22: note = chemically synthesized
  source 1..22: mol_type = other DNA
aggccaggagttcaagactagt

SEQ ID NO: 62950 - DNA, 22 bp, synthetic construct
  misc_feature 1..22: note = chemically synthesized
  source 1..22: mol_type = other DNA
aagactagtctgggcaacatag

SEQ ID NO: 62951 - DNA, 22 bp, synthetic construct
  misc_feature 1..22: note = chemically synthesized
  source 1..22: mol_type = other DNA
gtctgggcaacatagcaagacc

SEQ ID NO: 62952 - DNA, 22 bp, synthetic construct
  misc_feature 1..22: note = chemically synthesized
  source 1..22: mol_type = other DNA
ggcaacatagcaagacccctgt

SEQ ID NO: 62953 - DNA, 22 bp, synthetic construct
  misc_feature 1..22: note = chemically synthesized
  source 1..22: mol_type = other DNA
tctctttaaaaaagatcaaaat

SEQ ID NO: 62954 - DNA, 22 bp, synthetic construct
  misc_feature 1..22: note = chemically synthesized
  source 1..22: mol_type = other DNA
tttaaaaaagatcaaaattgac

SEQ ID NO: 62955 - DNA, 22 bp, synthetic construct
  misc_feature 1..22: note = chemically synthesized
  source 1..22: mol_type = other DNA
taaaaaagatcaaaattgacca

SEQ ID NO: 62956 - DNA, 22 bp, synthetic construct
  misc_feature 1..22: note = chemically synthesized
  source 1..22: mol_type = other DNA
aaaaaagatcaaaattgaccag

SEQ ID NO: 62957 - DNA, 22 bp, synthetic construct
  misc_feature 1..22: note = chemically synthesized
  source 1..22: mol_type = other DNA
aaaaagatcaaaattgaccagg

SEQ ID NO: 62958 - DNA, 22 bp, synthetic construct
  misc_feature 1..22: note = chemically synthesized
  source 1..22: mol_type = other DNA
accaggcacggtggcttatgct

SEQ ID NO: 62959 - DNA, 22 bp, synthetic construct
  misc_feature 1..22: note = chemically synthesized
  source 1..22: mol_type = other DNA
atgcttgtaatcccagcacttt

SEQ ID NO: 62960 - DNA, 22 bp, synthetic construct
  misc_feature 1..22: note = chemically synthesized
  source 1..22: mol_type = other DNA
tgcttgtaatcccagcactttg

SEQ ID NO: 62961 - DNA, 22 bp, synthetic construct
  misc_feature 1..22: note = chemically synthesized
  source 1..22: mol_type = other DNA
gtaatcccagcactttgggagg

SEQ ID NO: 62962 - DNA, 22 bp, synthetic construct
  misc_feature 1..22: note = chemically synthesized
  source 1..22: mol_type = other DNA
taatcccagcactttgggaggc

SEQ ID NO: 62963 - DNA, 22 bp, synthetic construct
  misc_feature 1..22: note = chemically synthesized
  source 1..22: mol_type = other DNA
tgggaggccgaggtgggtggat

SEQ ID NO: 62964 - DNA, 22 bp, synthetic construct
  misc_feature 1..22: note = chemically synthesized
  source 1..22: mol_type = other DNA
gggaggccgaggtgggtggatc

SEQ ID NO: 62965 - DNA, 22 bp, synthetic construct
  misc_feature 1..22: note = chemically synthesized
  source 1..22: mol_type = other DNA
ggaggccgaggtgggtggatca

SEQ ID NO: 62966 - DNA, 22 bp, synthetic construct
  misc_feature 1..22: note = chemically synthesized
  source 1..22: mol_type = other DNA
gaggtcaggagtttgagaccag

SEQ ID NO: 62967 - DNA, 22 bp, synthetic construct
  misc_feature 1..22: note = chemically synthesized
  source 1..22: mol_type = other DNA
aggtcaggagtttgagaccagc

SEQ ID NO: 62968 - DNA, 22 bp, synthetic construct
  misc_feature 1..22: note = chemically synthesized
  source 1..22: mol_type = other DNA
gagaccagcctgatcaacaggt

SEQ ID NO: 62969 - DNA, 22 bp, synthetic construct
  misc_feature 1..22: note = chemically synthesized
  source 1..22: mol_type = other DNA
agaccagcctgatcaacaggtg

SEQ ID NO: 62970 - DNA, 22 bp, synthetic construct
  misc_feature 1..22: note = chemically synthesized
  source 1..22: mol_type = other DNA
atcaacaggtgaaaccccatct

SEQ ID NO: 62971 - DNA, 22 bp, synthetic construct
  misc_feature 1..22: note = chemically synthesized
  source 1..22: mol_type = other DNA
tactaaaaaaaaaattacaaaa

SEQ ID NO: 62972 - DNA, 22 bp, synthetic construct
  misc_feature 1..22: note = chemically synthesized
  source 1..22: mol_type = other DNA
ctaaaaaaaaaattacaaaatt

SEQ ID NO: 62973 - DNA, 22 bp, synthetic construct
  misc_feature 1..22: note = chemically synthesized
  source 1..22: mol_type = other DNA
aaaaaaaaattacaaaattagc

SEQ ID NO: 62974 - DNA, 22 bp, synthetic construct
  misc_feature 1..22: note = chemically synthesized
  source 1..22: mol_type = other DNA
caaaattagccaggtggggtgg

SEQ ID NO: 62975 - DNA, 22 bp, synthetic construct
  misc_feature 1..22: note = chemically synthesized
  source 1..22: mol_type = other DNA
gccaggtggggtggctcacgcc

SEQ ID NO: 62976 - DNA, 22 bp, synthetic construct
  misc_feature 1..22: note = chemically synthesized
  source 1..22: mol_type = other DNA
acgcctgtaatcccagctattt

SEQ ID NO: 62977 - DNA, 22 bp, synthetic construct
  misc_feature 1..22: note = chemically synthesized
  source 1..22: mol_type = other DNA
taatcccagctatttgagaggc

SEQ ID NO: 62978 - DNA, 22 bp, synthetic construct
  misc_feature 1..22: note = chemically synthesized
  source 1..22: mol_type = other DNA
tttgagaggctgaggcaggaga

SEQ ID NO: 62979 - DNA, 22 bp, synthetic construct
  misc_feature 1..22: note = chemically synthesized
  source 1..22: mol_type = other DNA
gagaggctgaggcaggagaatt

SEQ ID NO: 62980 - DNA, 22 bp, synthetic construct
  misc_feature 1..22: note = chemically synthesized
  source 1..22: mol_type = other DNA
agaggctgaggcaggagaattg

SEQ ID NO: 62981 - DNA, 22 bp, synthetic construct
  misc_feature 1..22: note = chemically synthesized
  source 1..22: mol_type = other DNA
aggcaggagaattgcttgaact

SEQ ID NO: 62982 - DNA, 22 bp, synthetic construct
  misc_feature 1..22: note = chemically synthesized
  source 1..22: mol_type = other DNA
cttgaactcaggaggtggaggt

SEQ ID NO: 62983 - DNA, 22 bp, synthetic construct
  misc_feature 1..22: note = chemically synthesized
  source 1..22: mol_type = other DNA
gaactcaggaggtggaggttac

SEQ ID NO: 62984 - DNA, 22 bp, synthetic construct
  misc_feature 1..22: note = chemically synthesized
  source 1..22: mol_type = other DNA
aactcaggaggtggaggttaca

SEQ ID NO: 62985 - DNA, 22 bp, synthetic construct
  misc_feature 1..22: note = chemically synthesized
  source 1..22: mol_type = other DNA
aggaggtggaggttacagtgag

SEQ ID NO: 62986 - DNA, 22 bp, synthetic construct
  misc_feature 1..22: note = chemically synthesized
  source 1..22: mol_type = other DNA
cagtgagccgagactgcgccac

SEQ ID NO: 62987 - DNA, 22 bp, synthetic construct
  misc_feature 1..22: note = chemically synthesized
  source 1..22: mol_type = other DNA
cgccactgcactctagcctggg

SEQ ID NO: 62988 - DNA, 22 bp, synthetic construct
  misc_feature 1..22: note = chemically synthesized
  source 1..22: mol_type = other DNA
cactctagcctgggcaacaaga

SEQ ID NO: 62989 - DNA, 22 bp, synthetic construct
  misc_feature 1..22: note = chemically synthesized
  source 1..22: mol_type = other DNA
tagcctgggcaacaagagcaaa

SEQ ID NO: 62990 - DNA, 22 bp, synthetic construct
  misc_feature 1..22: note = chemically synthesized
  source 1..22: mol_type = other DNA
gcctgggcaacaagagcaaaac

SEQ ID NO: 62991 - DNA, 22 bp, synthetic construct
  misc_feature 1..22: note = chemically synthesized
  source 1..22: mol_type = other DNA
ggcaacaagagcaaaactccgt

SEQ ID NO: 62992 - DNA, 22 bp, synthetic construct
  misc_feature 1..22: note = chemically synthesized
  source 1..22: mol_type = other DNA
cgtctcaaaaaaaaaaaaaaaa

SEQ ID NO: 62993 - DNA, 22 bp, synthetic construct
  misc_feature 1..22: note = chemically synthesized
  source 1..22: mol_type = other DNA
aaaaaaaaaaaaaaaaggccag

SEQ ID NO: 62994 - DNA, 22 bp, synthetic construct
  misc_feature 1..22: note = chemically synthesized
  source 1..22: mol_type = other DNA
atgcctgcaatcccagcacttt

SEQ ID NO: 62995 - DNA, 22 bp, synthetic construct
  misc_feature 1..22: note = chemically synthesized
  source 1..22: mol_type = other DNA
caatcccagcactttgggaggc

SEQ ID NO: 62996 - DNA, 22 bp, synthetic construct
  misc_feature 1..22: note = chemically synthesized
  source 1..22: mol_type = other DNA
tgggaggctgaggcggatggat

SEQ ID NO: 62997 - DNA, 22 bp, synthetic construct
  misc_feature 1..22: note = chemically synthesized
  source 1..22: mol_type = other DNA
gggaggctgaggcggatggatc

SEQ ID NO: 62998 - DNA, 22 bp, synthetic construct
  misc_feature 1..22: note = chemically synthesized
  source 1..22: mol_type = other DNA
ggaggctgaggcggatggatca

SEQ ID NO: 62999 - DNA, 22 bp, synthetic construct
  misc_feature 1..22: note = chemically synthesized
  source 1..22: mol_type = other DNA
aggcggatggatcactaggtca

SEQ ID NO: 63000 - DNA, 22 bp, synthetic construct
  misc_feature 1..22: note = chemically synthesized
  source 1..22: mol_type = other DNA
ggtcaggagttcaagaccagcc

SEQ ID NO: 63001 - DNA, 22 bp, synthetic construct
  misc_feature 1..22: note = chemically synthesized
  source 1..22: mol_type = other DNA
aagaccagcctggccaatatgg

SEQ ID NO: 63002 - DNA, 22 bp, synthetic construct
  misc_feature 1..22: note = chemically synthesized
  source 1..22: mol_type = other DNA
gccaatatggtgaaaccccatc

SEQ ID NO: 63003 - DNA, 22 bp, synthetic construct
  misc_feature 1..22: note = chemically synthesized
  source 1..22: mol_type = other DNA
tactaaaaataaaaaaattagc

SEQ ID NO: 63004 - DNA, 22 bp, synthetic construct
  misc_feature 1..22: note = chemically synthesized
  source 1..22: mol_type = other DNA
ctaaaaataaaaaaattagcca

SEQ ID NO: 63005 - DNA, 22 bp, synthetic construct
  misc_feature 1..22: note = chemically synthesized
  source 1..22: mol_type = other DNA
aaaataaaaaaattagccaggt

SEQ ID NO: 63006 - DNA, 22 bp, synthetic construct
  misc_feature 1..22: note = chemically synthesized
  source 1..22: mol_type = other DNA
gccaggtgtggtggcacgtgcc

SEQ ID NO: 63007 - DNA, 22 bp, synthetic construct
  misc_feature 1..22: note = chemically synthesized
  source 1..22: mol_type = other DNA
tagtcccagctactcggtaggc

SEQ ID NO: 63008 - DNA, 22 bp, synthetic construct
  misc_feature 1..22: note = chemically synthesized
  source 1..22: mol_type = other DNA
ctcggtaggctgaggcagaaga

SEQ ID NO: 63009 - DNA, 22 bp, synthetic construct
  misc_feature 1..22: note = chemically synthesized
  source 1..22: mol_type = other DNA
ggtaggctgaggcagaagaata

SEQ ID NO: 63010 - DNA, 22 bp, synthetic construct
  misc_feature 1..22: note = chemically synthesized
  source 1..22: mol_type = other DNA
aggcagaagaatagcttgaacc

SEQ ID NO: 63011 - DNA, 22 bp, synthetic construct
  misc_feature 1..22: note = chemically synthesized
  source 1..22: mol_type = other DNA
gaacccaggaagcggaggttgc

SEQ ID NO: 63012 - DNA, 22 bp, synthetic construct
  misc_feature 1..22: note = chemically synthesized
  source 1..22: mol_type = other DNA
aacccaggaagcggaggttgca

SEQ ID NO: 63013 - DNA, 22 bp, synthetic construct
  misc_feature 1..22: note = chemically synthesized
  source 1..22: mol_type = other DNA
cagtgaggcgagatggcgccac

SEQ ID NO: 63014 - DNA, 22 bp, synthetic construct
  misc_feature 1..22: note = chemically synthesized
  source 1..22: mol_type = other DNA
cactccagcctgggcaacagag

SEQ ID NO: 63015 - DNA, 22 bp, synthetic construct
  misc_feature 1..22: note = chemically synthesized
  source 1..22: mol_type = other DNA
cagcctgggcaacagagcgaga

SEQ ID NO: 63016 - DNA, 22 bp, synthetic construct
  misc_feature 1..22: note = chemically synthesized
  source 1..22: mol_type = other DNA
ggcaacagagcgagattccgtc

SEQ ID NO: 63017 - DNA, 22 bp, synthetic construct
  misc_feature 1..22: note = chemically synthesized
  source 1..22: mol_type = other DNA
cgtctcaaaaaaaaaaaaaaaa

SEQ ID NO: 63018 - DNA, 22 bp, synthetic construct
  misc_feature 1..22: note = chemically synthesized
  source 1..22: mol_type = other DNA
aaaaaaaaaaaaaaaatgcctg

SEQ ID NO: 63019 - DNA, 22 bp, synthetic construct
  misc_feature 1..22: note = chemically synthesized
  source 1..22: mol_type = other DNA
tggcaagtggttaacccttgtg

SEQ ID NO: 63020 - DNA, 22 bp, synthetic construct
  misc_feature 1..22: note = chemically synthesized
  source 1..22: mol_type = other DNA
acccttgtgtatatgaatttta

SEQ ID NO: 63021 - DNA, 22 bp, synthetic construct
  misc_feature 1..22: note = chemically synthesized
  source 1..22: mol_type = other DNA
gtgtatatgaattttaacttcc

SEQ ID NO: 63022 - DNA, 22 bp, synthetic construct
  misc_feature 1..22: note = chemically synthesized
  source 1..22: mol_type = other DNA
tgtatatgaattttaacttccc

SEQ ID NO: 63023 - DNA, 22 bp, synthetic construct
  misc_feature 1..22: note = chemically synthesized
  source 1..22: mol_type = other DNA
taacttccctattttatctgtt

SEQ ID NO: 63024 - DNA, 22 bp, synthetic construct
  misc_feature 1..22: note = chemically synthesized
  source 1..22: mol_type = other DNA
aacttccctattttatctgttt

SEQ ID NO: 63025 - DNA, 22 bp, synthetic construct
  misc_feature 1..22: note = chemically synthesized
  source 1..22: mol_type = other DNA
acttccctattttatctgtttg

SEQ ID NO: 63026 - DNA, 22 bp, synthetic construct
  misc_feature 1..22: note = chemically synthesized
  source 1..22: mol_type = other DNA
ccctattttatctgtttgataa

SEQ ID NO: 63027 - DNA, 22 bp, synthetic construct
  misc_feature 1..22: note = chemically synthesized
  source 1..22: mol_type = other DNA
cctattttatctgtttgataat

SEQ ID NO: 63028 - DNA, 22 bp, synthetic construct
  misc_feature 1..22: note = chemically synthesized
  source 1..22: mol_type = other DNA
ttttatctgtttgataattaag

SEQ ID NO: 63029 - DNA, 22 bp, synthetic construct
  misc_feature 1..22: note = chemically synthesized
  source 1..22: mol_type = other DNA
tatctgtttgataattaaggat

SEQ ID NO: 63030 - DNA, 22 bp, synthetic construct
  misc_feature 1..22: note = chemically synthesized
  source 1..22: mol_type = other DNA
atctgtttgataattaaggatt

SEQ ID NO: 63031 - DNA, 22 bp, synthetic construct
  misc_feature 1..22: note = chemically synthesized
  source 1..22: mol_type = other DNA
tctgtttgataattaaggattt

SEQ ID NO: 63032 - DNA, 22 bp, synthetic construct
  misc_feature 1..22: note = chemically synthesized
  source 1..22: mol_type = other DNA
tttgataattaaggatttgcat

SEQ ID NO: 63033 - DNA, 22 bp, synthetic construct
  misc_feature 1..22: note = chemically synthesized
  source 1..22: mol_type = other DNA
gataattaaggatttgcatggc

SEQ ID NO: 63034 - DNA, 22 bp, synthetic construct
  misc_feature 1..22: note = chemically synthesized
  source 1..22: mol_type = other DNA
ataattaaggatttgcatggct

SEQ ID NO: 63035 - DNA, 22 bp, synthetic construct
  misc_feature 1..22: note = chemically synthesized
  source 1..22: mol_type = other DNA
aggatttgcatggctggcgcgg

SEQ ID NO: 63036 - DNA, 22 bp, synthetic construct
  misc_feature 1..22: note = chemically synthesized
  source 1..22: mol_type = other DNA
gcatggctggcgcggtggctca

SEQ ID NO: 63037 - DNA, 22 bp, synthetic construct
  misc_feature 1..22: note = chemically synthesized
  source 1..22: mol_type = other DNA
catggctggcgcggtggctcat

SEQ ID NO: 63038 - DNA, 22 bp, synthetic construct
  misc_feature 1..22: note = chemically synthesized
  source 1..22: mol_type = other DNA
gcgcggtggctcatgcctgtaa

SEQ ID NO: 63039 - DNA, 22 bp, synthetic construct
  misc_feature 1..22: note = chemically synthesized
  source 1..22: mol_type = other DNA
atgcctgtaatcccaatatttt

SEQ ID NO: 63040 - DNA, 22 bp, synthetic construct
  misc_feature 1..22: note = chemically synthesized
  source 1..22: mol_type = other DNA
taatcccaatattttaggaggc

SEQ ID NO: 63041 - DNA, 22 bp, synthetic construct
  misc_feature 1..22: note = chemically synthesized
  source 1..22: mol_type = other DNA
taggaggctgaggcaagccaat

SEQ ID NO: 63042 - DNA, 22 bp, synthetic construct
  misc_feature 1..22: note = chemically synthesized
  source 1..22: mol_type = other DNA
aggaggctgaggcaagccaatt

SEQ ID NO: 63043 - DNA, 22 bp, synthetic construct
  misc_feature 1..22: note = chemically synthesized
  source 1..22: mol_type = other DNA
ggaggctgaggcaagccaattg

SEQ ID NO: 63044 - DNA, 22 bp, synthetic construct
  misc_feature 1..22: note = chemically synthesized
  source 1..22: mol_type = other DNA
aggcaagccaattgcttgagat

SEQ ID NO: 63045 - DNA, 22 bp, synthetic construct
  misc_feature 1..22: note = chemically synthesized
  source 1..22: mol_type = other DNA
cttgagatcaagaccagcctga

SEQ ID NO: 63046 - DNA, 22 bp, synthetic construct
  misc_feature 1..22: note = chemically synthesized
  source 1..22: mol_type = other DNA
gagatcaagaccagcctgagcc

SEQ ID NO: 63047 - DNA, 22 bp, synthetic construct
  misc_feature 1..22: note = chemically synthesized
  source 1..22: mol_type = other DNA
agatcaagaccagcctgagcct

SEQ ID NO: 63048 - DNA, 22 bp, synthetic construct
  misc_feature 1..22: note = chemically synthesized
  source 1..22: mol_type = other DNA
agcctgggcaacatagcagaac

SEQ ID NO: 63049 - DNA, 22 bp, synthetic construct
  misc_feature 1..22: note = chemically synthesized
  source 1..22: mol_type = other DNA
ggcaacatagcagaactctgtc

SEQ ID NO: 63050 - DNA, 22 bp, synthetic construct
  misc_feature 1..22: note = chemically synthesized
  source 1..22: mol_type = other DNA
tgtctctacaaaaagatacgag

SEQ ID NO: 63051 - DNA, 22 bp, synthetic construct
  misc_feature 1..22: note = chemically synthesized
  source 1..22: mol_type = other DNA
tctctacaaaaagatacgagaa

SEQ ID NO: 63052 - DNA, 22 bp, synthetic construct
  misc_feature 1..22: note = chemically synthesized
  source 1..22: mol_type = other DNA
tacaaaaagatacgagaaatta

SEQ ID NO: 63053 - DNA, 22 bp, synthetic construct
  misc_feature 1..22: note = chemically synthesized
  source 1..22: mol_type = other DNA
caaaaagatacgagaaattagc

SEQ ID NO: 63054 - DNA, 22 bp, synthetic construct
  misc_feature 1..22: note = chemically synthesized
  source 1..22: mol_type = other DNA
gctgggtgtggtgtgtggcctg

SEQ ID NO: 63055 - DNA, 22 bp, synthetic construct
  misc_feature 1..22: note = chemically synthesized
  source 1..22: mol_type = other DNA
ggtgtggtgtgtggcctgtggt

SEQ ID NO: 63056 - DNA, 22 bp, synthetic construct
  misc_feature 1..22: note = chemically synthesized
  source 1..22: mol_type = other DNA
tggtcccagctactcagatggc

SEQ ID NO: 63057 - DNA, 22 bp, synthetic construct
  misc_feature 1..22: note = chemically synthesized
  source 1..22: mol_type = other DNA
ctcagatggctgaggtgggagg

SEQ ID NO: 63058 - DNA, 22 bp, synthetic construct
  misc_feature 1..22: note = chemically synthesized
  source 1..22: mol_type = other DNA
agatggctgaggtgggaggatc

SEQ ID NO: 63059 - DNA, 22 bp, synthetic construct
  misc_feature 1..22: note = chemically synthesized
  source 1..22: mol_type = other DNA
aggtgggaggatcgcttgagcc

SEQ ID NO: 63060 - DNA, 22 bp, synthetic construct
  misc_feature 1..22: note = chemically synthesized
  source 1..22: mol_type = other DNA
gagcctgggaggcagaggttgc

SEQ ID NO: 63061 - DNA, 22 bp, synthetic construct
  misc_feature 1..22: note = chemically synthesized
  source 1..22: mol_type = other DNA
agcctgggaggcagaggttgca

SEQ ID NO: 63062 - DNA, 22 bp, synthetic construct
  misc_feature 1..22: note = chemically synthesized
  source 1..22: mol_type = other DNA
ggaggcagaggttgcagcgaga

SEQ ID NO: 63063 - DNA, 22 bp, synthetic construct
  misc_feature 1..22: note = chemically synthesized
  source 1..22: mol_type = other DNA
cagcgagacatgatcgtgccac

SEQ ID NO: 63064 - DNA, 22 bp, synthetic construct
  misc_feature 1..22: note = chemically synthesized
  source 1..22: mol_type = other DNA
cacttcagcctggatgacagag

SEQ ID NO: 63065 - DNA, 22 bp, synthetic construct
  misc_feature 1..22: note = chemically synthesized
  source 1..22: mol_type = other DNA
cagcctggatgacagagcgaga

SEQ ID NO: 63066 - DNA, 22 bp, synthetic construct
  misc_feature 1..22: note = chemically synthesized
  source 1..22: mol_type = other DNA
agcctggatgacagagcgagac

SEQ ID NO: 63067 - DNA, 22 bp, synthetic construct
  misc_feature 1..22: note = chemically synthesized
  source 1..22: mol_type = other DNA
gatgacagagcgagactgcatc

SEQ ID NO: 63068 - DNA, 22 bp, synthetic construct
  misc_feature 1..22: note = chemically synthesized
  source 1..22: mol_type = other DNA
catctcaaaaataaaaataaaa

SEQ ID NO: 63069 - DNA, 22 bp, synthetic construct
  misc_feature 1..22: note = chemically synthesized
  source 1..22: mol_type = other DNA
aaaaataaaaataaaaaggatt

SEQ ID NO: 63070 - DNA, 22 bp, synthetic construct
  misc_feature 1..22: note = chemically synthesized
  source 1..22: mol_type = other DNA
gcactgtggctgcacacccgga

SEQ ID NO: 63071 - DNA, 22 bp, synthetic construct
  misc_feature 1..22: note = chemically synthesized
  source 1..22: mol_type = other DNA
cactgtggctgcacacccggaa

SEQ ID NO: 63072 - DNA, 22 bp, synthetic construct
  misc_feature 1..22: note = chemically synthesized
  source 1..22: mol_type = other DNA
tggctgcacacccggaattctc

SEQ ID NO: 63073 - DNA, 22 bp, synthetic construct
  misc_feature 1..22: note = chemically synthesized
  source 1..22: mol_type = other DNA
cacacccggaattctctgtagt

SEQ ID NO: 63074 - DNA, 22 bp, synthetic construct
  misc_feature 1..22: note = chemically synthesized
  source 1..22: mol_type = other DNA
tctgtagtaggaatatcttctg

SEQ ID NO: 63075 - DNA, 22 bp, synthetic construct
  misc_feature 1..22: note = chemically synthesized
  source 1..22: mol_type = other DNA
tgtagtaggaatatcttctgtt

SEQ ID NO: 63076 - DNA, 22 bp, synthetic construct
  misc_feature 1..22: note = chemically synthesized
  source 1..22: mol_type = other DNA
tagtaggaatatcttctgtttc

SEQ ID NO: 63077 - DNA, 22 bp, synthetic construct
  misc_feature 1..22: note = chemically synthesized
  source 1..22: mol_type = other DNA
ctgtttctctggttattttaac

SEQ ID NO: 63078 - DNA, 22 bp, synthetic construct
  misc_feature 1..22: note = chemically synthesized
  source 1..22: mol_type = other DNA
tgtttctctggttattttaacc

SEQ ID NO: 63079 - DNA, 22 bp, synthetic construct
  misc_feature 1..22: note = chemically synthesized
  source 1..22: mol_type = other DNA
tttctctggttattttaacctg

SEQ ID NO: 63080 - DNA, 22 bp, synthetic construct
  misc_feature 1..22: note = chemically synthesized
  source 1..22: mol_type = other DNA
ctctggttattttaacctggat

SEQ ID NO: 63081 - DNA, 22 bp, synthetic construct
  misc_feature 1..22: note = chemically synthesized
  source 1..22: mol_type = other DNA
tctggttattttaacctggatg

SEQ ID NO: 63082 - DNA, 22 bp, synthetic construct
  misc_feature 1..22: note = chemically synthesized
  source 1..22: mol_type = other DNA
tggttattttaacctggatggg

SEQ ID NO: 63083 - DNA, 22 bp, synthetic construct
  misc_feature 1..22: note = chemically synthesized
  source 1..22: mol_type = other DNA
gttattttaacctggatgggtg

SEQ ID NO: 63084 - DNA, 22 bp, synthetic construct
  misc_feature 1..22: note = chemically synthesized
  source 1..22: mol_type = other DNA
ttttaacctggatgggtgactc

SEQ ID NO: 63085 - DNA, 22 bp, synthetic construct
  misc_feature 1..22: note = chemically synthesized
  source 1..22: mol_type = other DNA
taacctggatgggtgactctgt

SEQ ID NO: 63086 - DNA, 22 bp, synthetic construct
  misc_feature 1..22: note = chemically synthesized
  source 1..22: mol_type = other DNA
aacctggatgggtgactctgtg

SEQ ID NO: 63087 - DNA, 22 bp, synthetic construct
  misc_feature 1..22: note = chemically synthesized
  source 1..22: mol_type = other DNA
acctggatgggtgactctgtgg

SEQ ID NO: 63088 - DNA, 22 bp, synthetic construct
  misc_feature 1..22: note = chemically synthesized
  source 1..22: mol_type = other DNA
gatgggtgactctgtggttggt

SEQ ID NO: 63089 - DNA, 22 bp, synthetic construct
  misc_feature 1..22: note = chemically synthesized
  source 1..22: mol_type = other DNA
tgtggttggtacagacatgggt

SEQ ID NO: 63090 - DNA, 22 bp, synthetic construct
  misc_feature 1..22: note = chemically synthesized
  source 1..22: mol_type = other DNA
tggttggtacagacatgggttt

SEQ ID NO: 63091 - DNA, 22 bp, synthetic construct
  misc_feature 1..22: note = chemically synthesized
  source 1..22: mol_type = other DNA
gtacagacatgggtttttattt

SEQ ID NO: 63092 - DNA, 22 bp, synthetic construct
  misc_feature 1..22: note = chemically synthesized
  source 1..22: mol_type = other DNA
ttatttaagccctgctgctact

SEQ ID NO: 63093 - DNA, 22 bp, synthetic construct
  misc_feature 1..22: note = chemically synthesized
  source 1..22: mol_type = other DNA
tatttaagccctgctgctactt

SEQ ID NO: 63094 - DNA, 22 bp, synthetic construct
  misc_feature 1..22: note = chemically synthesized
  source 1..22: mol_type = other DNA
atttaagccctgctgctacttc

SEQ ID NO: 63095 - DNA, 22 bp, synthetic construct
  misc_feature 1..22: note = chemically synthesized
  source 1..22: mol_type = other DNA
tttaagccctgctgctacttca

SEQ ID NO: 63096 - DNA, 22 bp, synthetic construct
  misc_feature 1..22: note = chemically synthesized
  source 1..22: mol_type = other DNA
aagccctgctgctacttcacta

SEQ ID NO: 63097 - DNA, 22 bp, synthetic construct
  misc_feature 1..22: note = chemically synthesized
  source 1..22: mol_type = other DNA
agccctgctgctacttcactac

SEQ ID NO: 63098 - DNA, 22 bp, synthetic construct
  misc_feature 1..22: note = chemically synthesized
  source 1..22: mol_type = other DNA
ctgctacttcactaccttattt

SEQ ID NO: 63099 - DNA, 22 bp, synthetic construct
  misc_feature 1..22: note = chemically synthesized
  source 1..22: mol_type = other DNA
ctacttcactaccttattttta

SEQ ID NO: 63100 - DNA, 22 bp, synthetic construct
  misc_feature 1..22: note = chemically synthesized
  source 1..22: mol_type = other DNA
cttcactaccttatttttataa

SEQ ID NO: 63101 - DNA, 22 bp, synthetic construct
  misc_feature 1..22: note = chemically synthesized
  source 1..22: mol_type = other DNA
cactaccttatttttataagtc

SEQ ID NO: 63102 - DNA, 22 bp, synthetic construct
  misc_feature 1..22: note = chemically synthesized
  source 1..22: mol_type = other DNA
actaccttatttttataagtcc

SEQ ID NO: 63103 - DNA, 22 bp, synthetic construct
  misc_feature 1..22: note = chemically synthesized
  source 1..22: mol_type = other DNA
ccttatttttataagtcccttc

SEQ ID NO: 63104 - DNA, 22 bp, synthetic construct
  misc_feature 1..22: note = chemically synthesized
  source 1..22: mol_type = other DNA
atttttataagtcccttcatgg

SEQ ID NO: 63105 - DNA, 22 bp, synthetic construct
  misc_feature 1..22: note = chemically synthesized
  source 1..22: mol_type = other DNA
tttttataagtcccttcatggt

SEQ ID NO: 63106 - DNA, 22 bp, synthetic construct
  misc_feature 1..22: note = chemically synthesized
  source 1..22: mol_type = other DNA
ttataagtcccttcatggtgtt

SEQ ID NO: 63107 - DNA, 22 bp, synthetic construct
  misc_feature 1..22: note = chemically synthesized
  source 1..22: mol_type = other DNA
tataagtcccttcatggtgttg

SEQ ID NO: 63108 - DNA, 22 bp, synthetic construct
  misc_feature 1..22: note = chemically synthesized
  source 1..22: mol_type = other DNA
ataagtcccttcatggtgttgg

SEQ ID NO: 63109 - DNA, 22 bp, synthetic construct
  misc_feature 1..22: note = chemically synthesized
  source 1..22: mol_type = other DNA
taagtcccttcatggtgttggg

SEQ ID NO: 63110 - DNA, 22 bp, synthetic construct
  misc_feature 1..22: note = chemically synthesized
  source 1..22: mol_type = other DNA
catggtgttgggctttgtttcc

SEQ ID NO: 63111 - DNA, 22 bp, synthetic construct
  misc_feature 1..22: note = chemically synthesized
  source 1..22: mol_type = other DNA
atggtgttgggctttgtttcct

SEQ ID NO: 63112 - DNA, 22 bp, synthetic construct
  misc_feature 1..22: note = chemically synthesized
  source 1..22: mol_type = other DNA
ggctttgtttccttatctgtaa

SEQ ID NO: 63113 - DNA, 22 bp, synthetic construct
  misc_feature 1..22: note = chemically synthesized
  source 1..22: mol_type = other DNA
tgtttccttatctgtaaaacaa

SEQ ID NO: 63114 - DNA, 22 bp, synthetic construct
  misc_feature 1..22: note = chemically synthesized
  source 1..22: mol_type = other DNA
gtttccttatctgtaaaacaac

SEQ ID NO: 63115 - DNA, 22 bp, synthetic construct
  misc_feature 1..22: note = chemically synthesized
  source 1..22: mol_type = other DNA
tttccttatctgtaaaacaacg

SEQ ID NO: 63116 - DNA, 22 bp, synthetic construct
  misc_feature 1..22: note = chemically synthesized
  source 1..22: mol_type = other DNA
ccttatctgtaaaacaacggat

SEQ ID NO: 63117 - DNA, 22 bp, synthetic construct
  misc_feature 1..22: note = chemically synthesized
  source 1..22: mol_type = other DNA
cttatctgtaaaacaacggatt

SEQ ID NO: 63118 - DNA, 22 bp, synthetic construct
  misc_feature 1..22: note = chemically synthesized
  source 1..22: mol_type = other DNA
atctgtaaaacaacggattgca

SEQ ID NO: 63119 - DNA, 22 bp, synthetic construct
  misc_feature 1..22: note = chemically synthesized
  source 1..22: mol_type = other DNA
tctgtaaaacaacggattgcac

SEQ ID NO: 63120 - DNA, 22 bp, synthetic construct
  misc_feature 1..22: note = chemically synthesized
  source 1..22: mol_type = other DNA
taaaacaacggattgcactact

SEQ ID NO: 63121 - DNA, 22 bp, synthetic construct
  misc_feature 1..22: note = chemically synthesized
  source 1..22: mol_type = other DNA
cactactggatccctttcagcc

SEQ ID NO: 63122 - DNA, 22 bp, synthetic construct
  misc_feature 1..22: note = chemically synthesized
  source 1..22: mol_type = other DNA
ctggatccctttcagcccaaac

SEQ ID NO: 63123 - DNA, 22 bp, synthetic construct
  misc_feature 1..22: note = chemically synthesized
  source 1..22: mol_type = other DNA
gatccctttcagcccaaacatt

SEQ ID NO: 63124 - DNA, 22 bp, synthetic construct
  misc_feature 1..22: note = chemically synthesized
  source 1..22: mol_type = other DNA
tcagcccaaacattccctgact

SEQ ID NO: 63125 - DNA, 22 bp, synthetic construct
  misc_feature 1..22: note = chemically synthesized
  source 1..22: mol_type = other DNA
cagcccaaacattccctgactc

SEQ ID NO: 63126 - DNA, 22 bp, synthetic construct
  misc_feature 1..22: note = chemically synthesized
  source 1..22: mol_type = other DNA
agcccaaacattccctgactct

SEQ ID NO: 63127 - DNA, 22 bp, synthetic construct
  misc_feature 1..22: note = chemically synthesized
  source 1..22: mol_type = other DNA
cctgactctgaggtttatccct

SEQ ID NO: 63128 - DNA, 22 bp, synthetic construct
  misc_feature 1..22: note = chemically synthesized
  source 1..22: mol_type = other DNA
actctgaggtttatccctatcc

SEQ ID NO: 63129 - DNA, 22 bp, synthetic construct
  misc_feature 1..22: note = chemically synthesized
  source 1..22: mol_type = other DNA
tgaggtttatccctatccaaag

SEQ ID NO: 63130 - DNA, 22 bp, synthetic construct
  misc_feature 1..22: note = chemically synthesized
  source 1..22: mol_type = other DNA
aggtttatccctatccaaagtg

SEQ ID NO: 63131 - DNA, 22 bp, synthetic construct
  misc_feature 1..22: note = chemically synthesized
  source 1..22: mol_type = other DNA
atccctatccaaagtgccacaa

SEQ ID NO: 63132 - DNA, 22 bp, synthetic construct
  misc_feature 1..22: note = chemically synthesized
  source 1..22: mol_type = other DNA
tccctatccaaagtgccacaac

SEQ ID NO: 63133 - DNA, 22 bp, synthetic construct
  misc_feature 1..22: note = chemically synthesized
  source 1..22: mol_type = other DNA
tccaaagtgccacaactcttaa

SEQ ID NO: 63134 - DNA, 22 bp, synthetic construct
  misc_feature 1..22: note = chemically synthesized
  source 1..22: mol_type = other DNA
ttaatcagcggctgcccaggtg

SEQ ID NO: 63135 - DNA, 22 bp, synthetic construct
  misc_feature 1..22: note = chemically synthesized
  source 1..22: mol_type = other DNA
aatcagcggctgcccaggtgtg

SEQ ID NO: 63136 - DNA, 22 bp, synthetic construct
  misc_feature 1..22: note = chemically synthesized
  source 1..22: mol_type = other DNA
atcagcggctgcccaggtgtgg

SEQ ID NO: 63137 - DNA, 22 bp, synthetic construct
  misc_feature 1..22: note = chemically synthesized
  source 1..22: mol_type = other DNA
cccaggtgtgggagcgggctag

SEQ ID NO: 63138 - DNA, 22 bp, synthetic construct
  misc_feature 1..22: note = chemically synthesized
  source 1..22: mol_type = other DNA
gggggatgtgaggaagaatacg

SEQ ID NO: 63139 - DNA, 22 bp, synthetic construct
  misc_feature 1..22: note = chemically synthesized
  source 1..22: mol_type = other DNA
cagagagagctgcctcctgccc

SEQ ID NO: 63140 - DNA, 22 bp, synthetic construct
  misc_feature 1..22: note = chemically synthesized
  source 1..22: mol_type = other DNA
cctcctgccctccaccacctac

SEQ ID NO: 63141 - DNA, 22 bp, synthetic construct
  misc_feature 1..22: note = chemically synthesized
  source 1..22: mol_type = other DNA
ctgccctccaccacctacaccc

SEQ ID NO: 63142 - DNA, 22 bp, synthetic construct
  misc_feature 1..22: note = chemically synthesized
  source 1..22: mol_type = other DNA
ccctccaccacctacaccccag

SEQ ID NO: 63143 - DNA, 22 bp, synthetic construct
  misc_feature 1..22: note = chemically synthesized
  source 1..22: mol_type = other DNA
caccacctacaccccagtggtg

SEQ ID NO: 63144 - DNA, 22 bp, synthetic construct
  misc_feature 1..22: note = chemically synthesized
  source 1..22: mol_type = other DNA
caccccagtggtgagttcttac

SEQ ID NO: 63145 - DNA, 22 bp, synthetic construct
  misc_feature 1..22: note = chemically synthesized
  source 1..22: mol_type = other DNA
ttaccgaaatctgtaggtcggc

SEQ ID NO: 63146 - DNA, 22 bp, synthetic construct
  misc_feature 1..22: note = chemically synthesized
  source 1..22: mol_type = other DNA
accgaaatctgtaggtcggctt

SEQ ID NO: 63147 - DNA, 22 bp, synthetic construct
  misc_feature 1..22: note = chemically synthesized
  source 1..22: mol_type = other DNA
ccgaaatctgtaggtcggcttt

SEQ ID NO: 63148 - DNA, 22 bp, synthetic construct
  misc_feature 1..22: note = chemically synthesized
  source 1..22: mol_type = other DNA
taggtcggctttatctttccct

SEQ ID NO: 63149 - DNA, 22 bp, synthetic construct
  misc_feature 1..22: note = chemically synthesized
  source 1..22: mol_type = other DNA
tatctttccctgaaagatggaa

SEQ ID NO: 63150 - DNA, 22 bp, synthetic construct
  misc_feature 1..22: note = chemically synthesized
  source 1..22: mol_type = other DNA
atctttccctgaaagatggaaa

SEQ ID NO: 63151 - DNA, 22 bp, synthetic construct
  misc_feature 1..22: note = chemically synthesized
  source 1..22: mol_type = other DNA
tctttccctgaaagatggaaag

SEQ ID NO: 63152 - DNA, 22 bp, synthetic construct
  misc_feature 1..22: note = chemically synthesized
  source 1..22: mol_type = other DNA
tccctgaaagatggaaagagta

SEQ ID NO: 63153 - DNA, 22 bp, synthetic construct
  misc_feature 1..22: note = chemically synthesized
  source 1..22: mol_type = other DNA
ccctgaaagatggaaagagtag

SEQ ID NO: 63154 - DNA, 22 bp, synthetic construct
  misc_feature 1..22: note = chemically synthesized
  source 1..22: mol_type = other DNA
cctgaaagatggaaagagtaga

SEQ ID NO: 63155 - DNA, 22 bp, synthetic construct
  misc_feature 1..22: note = chemically synthesized
  source 1..22: mol_type = other DNA
aaagatggaaagagtagatgtg

SEQ ID NO: 63156 - DNA, 22 bp, synthetic construct
  misc_feature 1..22: note = chemically synthesized
  source 1..22: mol_type = other DNA
ctgtgcccatggcatggccaga

SEQ ID NO: 63157 - DNA, 22 bp, synthetic construct
  misc_feature 1..22: note = chemically synthesized
  source 1..22: mol_type = other DNA
tgcccatggcatggccagaggg

SEQ ID NO: 63158 - DNA, 22 bp, synthetic construct
  misc_feature 1..22: note = chemically synthesized
  source 1..22: mol_type = other DNA
cctaaagggcaggaaagagaat

SEQ ID NO: 63159 - DNA, 22 bp, synthetic construct
  misc_feature 1..22: note = chemically synthesized
  source 1..22: mol_type = other DNA
aagggcaggaaagagaatggag

SEQ ID NO: 63160 - DNA, 22 bp, synthetic construct
  misc_feature 1..22: note = chemically synthesized
  source 1..22: mol_type = other DNA
atctgggagacagtgcatcatc

SEQ ID NO: 63161 - DNA, 22 bp, synthetic construct
  misc_feature 1..22: note = chemically synthesized
  source 1..22: mol_type = other DNA
ggagacagtgcatcatctaccc

SEQ ID NO: 63162 - DNA, 22 bp, synthetic construct
  misc_feature 1..22: note = chemically synthesized
  source 1..22: mol_type = other DNA
cccagccacccagccatccccc

SEQ ID NO: 63163 - DNA, 22 bp, synthetic construct
  misc_feature 1..22: note = chemically synthesized
  source 1..22: mol_type = other DNA
tccacccatctacccattcatc

SEQ ID NO: 63164 - DNA, 22 bp, synthetic construct
  misc_feature 1..22: note = chemically synthesized
  source 1..22: mol_type = other DNA
cccattcatccatccattcacc

SEQ ID NO: 63165 - DNA, 22 bp, synthetic construct
  misc_feature 1..22: note = chemically synthesized
  source 1..22: mol_type = other DNA
atccatccattcaccccccatc

SEQ ID NO: 63166 - DNA, 22 bp, synthetic construct
  misc_feature 1..22: note = chemically synthesized
  source 1..22: mol_type = other DNA
accccccatccatccgttcacc

SEQ ID NO: 63167 - DNA, 22 bp, synthetic construct
  misc_feature 1..22: note = chemically synthesized
  source 1..22: mol_type = other DNA
accccccatccatccacccatc

SEQ ID NO: 63168 - DNA, 22 bp, synthetic construct
  misc_feature 1..22: note = chemically synthesized
  source 1..22: mol_type = other DNA
accatccattcgttatccataa

SEQ ID NO: 63169 - DNA, 22 bp, synthetic construct
  misc_feature 1..22: note = chemically synthesized
  source 1..22: mol_type = other DNA
ccatccattcgttatccataat

SEQ ID NO: 63170 - DNA, 22 bp, synthetic construct
  misc_feature 1..22: note = chemically synthesized
  source 1..22: mol_type = other DNA
gttatccataattcatttattt

SEQ ID NO: 63171 - DNA, 22 bp, synthetic construct
  misc_feature 1..22: note = chemically synthesized
  source 1..22: mol_type = other DNA
tccataattcatttatttaaca

SEQ ID NO: 63172 - DNA, 22 bp, synthetic construct
  misc_feature 1..22: note = chemically synthesized
  source 1..22: mol_type = other DNA
atttatttaacaaatttccatc

SEQ ID NO: 63173 - DNA, 22 bp, synthetic construct
  misc_feature 1..22: note = chemically synthesized
  source 1..22: mol_type = other DNA
atttaacaaatttccatctcct

SEQ ID NO: 63174 - DNA, 22 bp, synthetic construct
  misc_feature 1..22: note = chemically synthesized
  source 1..22: mol_type = other DNA
tttaacaaatttccatctccta

SEQ ID NO: 63175 - DNA, 22 bp, synthetic construct
  misc_feature 1..22: note = chemically synthesized
  source 1..22: mol_type = other DNA
aacaaatttccatctcctatgc

SEQ ID NO: 63176 - DNA, 22 bp, synthetic construct
  misc_feature 1..22: note = chemically synthesized
  source 1..22: mol_type = other DNA
acaaatttccatctcctatgca

SEQ ID NO: 63177 - DNA, 22 bp, synthetic construct
  misc_feature 1..22: note = chemically synthesized
  source 1..22: mol_type = other DNA
ccatctcctatgcaccaagcat

SEQ ID NO: 63178 - DNA, 22 bp, synthetic construct
  misc_feature 1..22: note = chemically synthesized
  source 1..22: mol_type = other DNA
catctcctatgcaccaagcatt

SEQ ID NO: 63179 - DNA, 22 bp, synthetic construct
  misc_feature 1..22: note = chemically synthesized
  source 1..22: mol_type = other DNA
ctatgcaccaagcattgtgcaa

SEQ ID NO: 63180 - DNA, 22 bp, synthetic construct
  misc_feature 1..22: note = chemically synthesized
  source 1..22: mol_type = other DNA
tgcaccaagcattgtgcaaggc

SEQ ID NO: 63181 - DNA, 22 bp, synthetic construct
  misc_feature 1..22: note = chemically synthesized
  source 1..22: mol_type = other DNA
tgcaaggctctgggaatacaat

SEQ ID NO: 63182 - DNA, 22 bp, synthetic construct
  misc_feature 1..22: note = chemically synthesized
  source 1..22: mol_type = other DNA
tgggaatacaatgatgagcaaa

SEQ ID NO: 63183 - DNA, 22 bp, synthetic construct
  misc_feature 1..22: note = chemically synthesized
  source 1..22: mol_type = other DNA
ggaatacaatgatgagcaaagc

SEQ ID NO: 63184 - DNA, 22 bp, synthetic construct
  misc_feature 1..22: note = chemically synthesized
  source 1..22: mol_type = other DNA
ctcttgcagtttaatacagtct

SEQ ID NO: 63185 - DNA, 22 bp, synthetic construct
  misc_feature 1..22: note = chemically synthesized
  source 1..22: mol_type = other DNA
ttgcagtttaatacagtctgga

SEQ ID NO: 63186 - DNA, 22 bp, synthetic construct
  misc_feature 1..22: note = chemically synthesized
  source 1..22: mol_type = other DNA
gcagtttaatacagtctggaga

SEQ ID NO: 63187 - DNA, 22 bp, synthetic construct
  misc_feature 1..22: note = chemically synthesized
  source 1..22: mol_type = other DNA
cagtttaatacagtctggagat

SEQ ID NO: 63188 - DNA, 22 bp, synthetic construct
  misc_feature 1..22: note = chemically synthesized
  source 1..22: mol_type = other DNA
aatacagtctggagattacaca

SEQ ID NO: 63189 - DNA, 22 bp, synthetic construct
  misc_feature 1..22: note = chemically synthesized
  source 1..22: mol_type = other DNA
atacagtctggagattacacaa

SEQ ID NO: 63190 - DNA, 22 bp, synthetic construct
  misc_feature 1..22: note = chemically synthesized
  source 1..22: mol_type = other DNA
gagattacacaaagaatcagca

SEQ ID NO: 63191 - DNA, 22 bp, synthetic construct
  misc_feature 1..22: note = chemically synthesized
  source 1..22: mol_type = other DNA
cacaaagaatcagcatactggg

SEQ ID NO: 63192 - DNA, 22 bp, synthetic construct
  misc_feature 1..22: note = chemically synthesized
  source 1..22: mol_type = other DNA
ggcgtacaattacaaactgatc

SEQ ID NO: 63193 - DNA, 22 bp, synthetic construct
  misc_feature 1..22: note = chemically synthesized
  source 1..22: mol_type = other DNA
caaactgatctgccctccacat

SEQ ID NO: 63194 - DNA, 22 bp, synthetic construct
  misc_feature 1..22: note = chemically synthesized
  source 1..22: mol_type = other DNA
atctgccctccacatcttctgt

SEQ ID NO: 63195 - DNA, 22 bp, synthetic construct
  misc_feature 1..22: note = chemically synthesized
  source 1..22: mol_type = other DNA
ccctccacatcttctgttcctt

SEQ ID NO: 63196 - DNA, 22 bp, synthetic construct
  misc_feature 1..22: note = chemically synthesized
  source 1..22: mol_type = other DNA
cacatcttctgttccttctctc

SEQ ID NO: 63197 - DNA, 22 bp, synthetic construct
  misc_feature 1..22: note = chemically synthesized
  source 1..22: mol_type = other DNA
ctgttccttctctccttgcaca

SEQ ID NO: 63198 - DNA, 22 bp, synthetic construct
  misc_feature 1..22: note = chemically synthesized
  source 1..22: mol_type = other DNA
tgttccttctctccttgcacac

SEQ ID NO: 63199 - DNA, 22 bp, synthetic construct
  misc_feature 1..22: note = chemically synthesized
  source 1..22: mol_type = other DNA
ttccttctctccttgcacactc

SEQ ID NO: 63200 - DNA, 22 bp, synthetic construct
  misc_feature 1..22: note = chemically synthesized
  source 1..22: mol_type = other DNA
cttctctccttgcacactctgt

SEQ ID NO: 63201 - DNA, 22 bp, synthetic construct
  misc_feature 1..22: note = chemically synthesized
  source 1..22: mol_type = other DNA
ctctccttgcacactctgttct

SEQ ID NO: 63202 - DNA, 22 bp, synthetic construct
  misc_feature 1..22: note = chemically synthesized
  source 1..22: mol_type = other DNA
tctccttgcacactctgttctg

SEQ ID NO: 63203 - DNA, 22 bp, synthetic construct
  misc_feature 1..22: note = chemically synthesized
  source 1..22: mol_type = other DNA
tccttgcacactctgttctggc

SEQ ID NO: 63204 - DNA, 22 bp, synthetic construct
  misc_feature 1..22: note = chemically synthesized
  source 1..22: mol_type = other DNA
cttgcacactctgttctggcta

SEQ ID NO: 63205 - DNA, 22 bp, synthetic construct
  misc_feature 1..22: note = chemically synthesized
  source 1..22: mol_type = other DNA
gcacactctgttctggctacac

SEQ ID NO: 63206 - DNA, 22 bp, synthetic construct
  misc_feature 1..22: note = chemically synthesized
  source 1..22: mol_type = other DNA
cacactctgttctggctacact

SEQ ID NO: 63207 - DNA, 22 bp, synthetic construct
  misc_feature 1..22: note = chemically synthesized
  source 1..22: mol_type = other DNA
tgttctggctacactggcctca

SEQ ID NO: 63208 - DNA, 22 bp, synthetic construct
  misc_feature 1..22: note = chemically synthesized
  source 1..22: mol_type = other DNA
ttctggctacactggcctcatt

SEQ ID NO: 63209 - DNA, 22 bp, synthetic construct
  misc_feature 1..22: note = chemically synthesized
  source 1..22: mol_type = other DNA
tggctacactggcctcattgct

SEQ ID NO: 63210 - DNA, 22 bp, synthetic construct
  misc_feature 1..22: note = chemically synthesized
  source 1..22: mol_type = other DNA
gctacactggcctcattgcttt

SEQ ID NO: 63211 - DNA, 22 bp, synthetic construct
  misc_feature 1..22: note = chemically synthesized
  source 1..22: mol_type = other DNA
cactggcctcattgctttcctt

SEQ ID NO: 63212 - DNA, 22 bp, synthetic construct
  misc_feature 1..22: note = chemically synthesized
  source 1..22: mol_type = other DNA
gcctcattgctttcctttaaac

SEQ ID NO: 63213 - DNA, 22 bp, synthetic construct
  misc_feature 1..22: note = chemically synthesized
  source 1..22: mol_type = other DNA
attgctttcctttaaacacacc

SEQ ID NO: 63214 - DNA, 22 bp, synthetic construct
  misc_feature 1..22: note = chemically synthesized
  source 1..22: mol_type = other DNA
ctttcctttaaacacaccaaac

SEQ ID NO: 63215 - DNA, 22 bp, synthetic construct
  misc_feature 1..22: note = chemically synthesized
  source 1..22: mol_type = other DNA
tcctttaaacacaccaaacacg

SEQ ID NO: 63216 - DNA, 22 bp, synthetic construct
  misc_feature 1..22: note = chemically synthesized
  source 1..22: mol_type = other DNA
cctttaaacacaccaaacacgt

SEQ ID NO: 63217 - DNA, 22 bp, synthetic construct
  misc_feature 1..22: note = chemically synthesized
  source 1..22: mol_type = other DNA
ctttaaacacaccaaacacgtt

SEQ ID NO: 63218 - DNA, 22 bp, synthetic construct
  misc_feature 1..22: note = chemically synthesized
  source 1..22: mol_type = other DNA
taaacacaccaaacacgttccc

SEQ ID NO: 63219 - DNA, 22 bp, synthetic construct
  misc_feature 1..22: note = chemically synthesized
  source 1..22: mol_type = other DNA
aaacacaccaaacacgttccca

SEQ ID NO: 63220 - DNA, 22 bp, synthetic construct
  misc_feature 1..22: note = chemically synthesized
  source 1..22: mol_type = other DNA
aacacaccaaacacgttcccac

SEQ ID NO: 63221 - DNA, 22 bp, synthetic construct
  misc_feature 1..22: note = chemically synthesized
  source 1..22: mol_type = other DNA
ccacctcagggcttttgcattg

SEQ ID NO: 63222 - DNA, 22 bp, synthetic construct
  misc_feature 1..22: note = chemically synthesized
  source 1..22: mol_type = other DNA
agggcttttgcattgcaatctt

SEQ ID NO: 63223 - DNA, 22 bp, synthetic construct
  misc_feature 1..22: note = chemically synthesized
  source 1..22: mol_type = other DNA
ttgcattgcaatcttctctggc

SEQ ID NO: 63224 - DNA, 22 bp, synthetic construct
  misc_feature 1..22: note = chemically synthesized
  source 1..22: mol_type = other DNA
tgcattgcaatcttctctggcc

SEQ ID NO: 63225 - DNA, 22 bp, synthetic construct
  misc_feature 1..22: note = chemically synthesized
  source 1..22: mol_type = other DNA
gcattgcaatcttctctggcca

SEQ ID NO: 63226 - DNA, 22 bp, synthetic construct
  misc_feature 1..22: note = chemically synthesized
  source 1..22: mol_type = other DNA
cattgcaatcttctctggccag

SEQ ID NO: 63227 - DNA, 22 bp, synthetic construct
  misc_feature 1..22: note = chemically synthesized
  source 1..22: mol_type = other DNA
caatcttctctggccagacagc

SEQ ID NO: 63228 - DNA, 22 bp, synthetic construct
  misc_feature 1..22: note = chemically synthesized
  source 1..22: mol_type = other DNA
ctctggccagacagcccttcac

SEQ ID NO: 63229 - DNA, 22 bp, synthetic construct
  misc_feature 1..22: note = chemically synthesized
  source 1..22: mol_type = other DNA
tctggccagacagcccttcaca

SEQ ID NO: 63230 - DNA, 22 bp, synthetic construct
  misc_feature 1..22: note = chemically synthesized
  source 1..22: mol_type = other DNA
tggccagacagcccttcacagc

SEQ ID NO: 63231 - DNA, 22 bp, synthetic construct
  misc_feature 1..22: note = chemically synthesized
  source 1..22: mol_type = other DNA
gccagacagcccttcacagctc

SEQ ID NO: 63232 - DNA, 22 bp, synthetic construct
  misc_feature 1..22: note = chemically synthesized
  source 1..22: mol_type = other DNA
cacagctcttctgccagaaact

SEQ ID NO: 63233 - DNA, 22 bp, synthetic construct
  misc_feature 1..22: note = chemically synthesized
  source 1..22: mol_type = other DNA
acagctcttctgccagaaactt

SEQ ID NO: 63234 - DNA, 22 bp, synthetic construct
  misc_feature 1..22: note = chemically synthesized
  source 1..22: mol_type = other DNA
ttctgccagaaacttacttcct

SEQ ID NO: 63235 - DNA, 22 bp, synthetic construct
  misc_feature 1..22: note = chemically synthesized
  source 1..22: mol_type = other DNA
ctgccagaaacttacttcctca

SEQ ID NO: 63236 - DNA, 22 bp, synthetic construct
  misc_feature 1..22: note = chemically synthesized
  source 1..22: mol_type = other DNA
tgccagaaacttacttcctcac

SEQ ID NO: 63237 - DNA, 22 bp, synthetic construct
  misc_feature 1..22: note = chemically synthesized
  source 1..22: mol_type = other DNA
ccagaaacttacttcctcacat

SEQ ID NO: 63238 - DNA, 22 bp, synthetic construct
  misc_feature 1..22: note = chemically synthesized
  source 1..22: mol_type = other DNA
acttcctcacatccttgaagac

SEQ ID NO: 63239 - DNA, 22 bp, synthetic construct
  misc_feature 1..22: note = chemically synthesized
  source 1..22: mol_type = other DNA
cttcctcacatccttgaagact

SEQ ID NO: 63240 - DNA, 22 bp, synthetic construct
  misc_feature 1..22: note = chemically synthesized
  source 1..22: mol_type = other DNA
cctcacatccttgaagacttga

SEQ ID NO: 63241 - DNA, 22 bp, synthetic construct
  misc_feature 1..22: note = chemically synthesized
  source 1..22: mol_type = other DNA
ctcacatccttgaagacttgac

SEQ ID NO: 63242 - DNA, 22 bp, synthetic construct
  misc_feature 1..22: note = chemically synthesized
  source 1..22: mol_type = other DNA
acatccttgaagacttgactca

SEQ ID NO: 63243 - DNA, 22 bp, synthetic construct
  misc_feature 1..22: note = chemically synthesized
  source 1..22: mol_type = other DNA
gaagacttgactcagatctcat

SEQ ID NO: 63244 - DNA, 22 bp, synthetic construct
  misc_feature 1..22: note = chemically synthesized
  source 1..22: mol_type = other DNA
aagacttgactcagatctcata

SEQ ID NO: 63245 - DNA, 22 bp, synthetic construct
  misc_feature 1..22: note = chemically synthesized
  source 1..22: mol_type = other DNA
gactcagatctcatattctcag

SEQ ID NO: 63246 - DNA, 22 bp, synthetic construct
  misc_feature 1..22: note = chemically synthesized
  source 1..22: mol_type = other DNA
actcagatctcatattctcagt

SEQ ID NO: 63247 - DNA, 22 bp, synthetic construct
  misc_feature 1..22: note = chemically synthesized
  source 1..22: mol_type = other DNA
agatctcatattctcagtgagt

SEQ ID NO: 63248 - DNA, 22 bp, synthetic construct
  misc_feature 1..22: note = chemically synthesized
  source 1..22: mol_type = other DNA
atattctcagtgagtcctactc

SEQ ID NO: 63249 - DNA, 22 bp, synthetic construct
  misc_feature 1..22: note = chemically synthesized
  source 1..22: mol_type = other DNA
tcagtgagtcctactctgacca

SEQ ID NO: 63250 - DNA, 22 bp, synthetic construct
  misc_feature 1..22: note = chemically synthesized
  source 1..22: mol_type = other DNA
agtgagtcctactctgaccacg

SEQ ID NO: 63251 - DNA, 22 bp, synthetic construct
  misc_feature 1..22: note = chemically synthesized
  source 1..22: mol_type = other DNA
ctctgaccacgctatttaaccc

SEQ ID NO: 63252 - DNA, 22 bp, synthetic construct
  misc_feature 1..22: note = chemically synthesized
  source 1..22: mol_type = other DNA
tgaccacgctatttaaccctgc

SEQ ID NO: 63253 - DNA, 22 bp, synthetic construct
  misc_feature 1..22: note = chemically synthesized
  source 1..22: mol_type = other DNA
accacgctatttaaccctgctt

SEQ ID NO: 63254 - DNA, 22 bp, synthetic construct
  misc_feature 1..22: note = chemically synthesized
  source 1..22: mol_type = other DNA
tttaaccctgcttgcaaccggt

SEQ ID NO: 63255 - DNA, 22 bp, synthetic construct
  misc_feature 1..22: note = chemically synthesized
  source 1..22: mol_type = other DNA
aaccctgcttgcaaccggttcc

SEQ ID NO: 63256 - DNA, 22 bp, synthetic construct
  misc_feature 1..22: note = chemically synthesized
  source 1..22: mol_type = other DNA
accctgcttgcaaccggttccg

SEQ ID NO: 63257 - DNA, 22 bp, synthetic construct
  misc_feature 1..22: note = chemically synthesized
  source 1..22: mol_type = other DNA
cttgcaaccggttccgtttttt

SEQ ID NO: 63258 - DNA, 22 bp, synthetic construct
  misc_feature 1..22: note = chemically synthesized
  source 1..22: mol_type = other DNA
gcaaccggttccgtttttttat

SEQ ID NO: 63259 - DNA, 22 bp, synthetic construct
  misc_feature 1..22: note = chemically synthesized
  source 1..22: mol_type = other DNA
caaccggttccgtttttttatt

SEQ ID NO: 63260 - DNA, 22 bp, synthetic construct
  misc_feature 1..22: note = chemically synthesized
  source 1..22: mol_type = other DNA
cgtttttttatttgtttgtttt

SEQ ID NO: 63261 - DNA, 22 bp, synthetic construct
  misc_feature 1..22: note = chemically synthesized
  source 1..22: mol_type = other DNA
ttttatttgtttgttttttgtt

SEQ ID NO: 63262 - DNA, 22 bp, synthetic construct
  misc_feature 1..22: note = chemically synthesized
  source 1..22: mol_type = other DNA
tttatttgtttgttttttgttt

SEQ ID NO: 63263 - DNA, 22 bp, synthetic construct
  misc_feature 1..22: note = chemically synthesized
  source 1..22: mol_type = other DNA
ttatttgtttgttttttgtttt

SEQ ID NO: 63264 - DNA, 22 bp, synthetic construct
  misc_feature 1..22: note = chemically synthesized
  source 1..22: mol_type = other DNA
tatttgtttgttttttgttttt

SEQ ID NO: 63265 - DNA, 22 bp, synthetic construct
  misc_feature 1..22: note = chemically synthesized
  source 1..22: mol_type = other DNA
atttgtttgttttttgtttttt

SEQ ID NO: 63266 - DNA, 22 bp, synthetic construct
  misc_feature 1..22: note = chemically synthesized
  source 1..22: mol_type = other DNA
tttgtttgttttttgttttttt

SEQ ID NO: 63267 - DNA, 22 bp, synthetic construct
  misc_feature 1..22: note = chemically synthesized
  source 1..22: mol_type = other DNA
gtttgttttttgtttttttaga

SEQ ID NO: 63268 - DNA, 22 bp, synthetic construct
  misc_feature 1..22: note = chemically synthesized
  source 1..22: mol_type = other DNA
tttgttttttgtttttttagag

SEQ ID NO: 63269 - DNA, 22 bp, synthetic construct
  misc_feature 1..22: note = chemically synthesized
  source 1..22: mol_type = other DNA
gttttttgtttttttagagaca

SEQ ID NO: 63270 - DNA, 22 bp, synthetic construct
  misc_feature 1..22: note = chemically synthesized
  source 1..22: mol_type = other DNA
ttttttgtttttttagagacag

SEQ ID NO: 63271 - DNA, 22 bp, synthetic construct
  misc_feature 1..22: note = chemically synthesized
  source 1..22: mol_type = other DNA
tttgtttttttagagacagtgt

SEQ ID NO: 63272 - DNA, 22 bp, synthetic construct
  misc_feature 1..22: note = chemically synthesized
  source 1..22: mol_type = other DNA
ttgtttttttagagacagtgtc

SEQ ID NO: 63273 - DNA, 22 bp, synthetic construct
  misc_feature 1..22: note = chemically synthesized
  source 1..22: mol_type = other DNA
tgtttttttagagacagtgtct

SEQ ID NO: 63274 - DNA, 22 bp, synthetic construct
  misc_feature 1..22: note = chemically synthesized
  source 1..22: mol_type = other DNA
gtttttttagagacagtgtctt

SEQ ID NO: 63275 - DNA, 22 bp, synthetic construct
  misc_feature 1..22: note = chemically synthesized
  source 1..22: mol_type = other DNA
tttttttagagacagtgtcttg

SEQ ID NO: 63276 - DNA, 22 bp, synthetic construct
  misc_feature 1..22: note = chemically synthesized
  source 1..22: mol_type = other DNA
ttttagagacagtgtcttgctt

SEQ ID NO: 63277 - DNA, 22 bp, synthetic construct
  misc_feature 1..22: note = chemically synthesized
  source 1..22: mol_type = other DNA
tttagagacagtgtcttgcttt

SEQ ID NO: 63278 - DNA, 22 bp, synthetic construct
  misc_feature 1..22: note = chemically synthesized
  source 1..22: mol_type = other DNA
ttagagacagtgtcttgctttg

SEQ ID NO: 63279 - DNA, 22 bp, synthetic construct
  misc_feature 1..22: note = chemically synthesized
  source 1..22: mol_type = other DNA
tagagacagtgtcttgctttgt

SEQ ID NO: 63280 - DNA, 22 bp, synthetic construct
  misc_feature 1..22: note = chemically synthesized
  source 1..22: mol_type = other DNA
agagacagtgtcttgctttgtc

SEQ ID NO: 63281 - DNA, 22 bp, synthetic construct
  misc_feature 1..22: note = chemically synthesized
  source 1..22: mol_type = other DNA
gagacagtgtcttgctttgtct

SEQ ID NO: 63282 - DNA, 22 bp, synthetic construct
  misc_feature 1..22: note = chemically synthesized
  source 1..22: mol_type = other DNA
gctttgtctcctaggctgcaat

SEQ ID NO: 63283 - DNA, 22 bp, synthetic construct
  misc_feature 1..22: note = chemically synthesized
  source 1..22: mol_type = other DNA
ctttgtctcctaggctgcaatg

SEQ ID NO: 63284 - DNA, 22 bp, synthetic construct
  misc_feature 1..22: note = chemically synthesized
  source 1..22: mol_type = other DNA
tgtctcctaggctgcaatgcag

SEQ ID NO: 63285 - DNA, 22 bp, synthetic construct
  misc_feature 1..22: note = chemically synthesized
  source 1..22: mol_type = other DNA
gtctcctaggctgcaatgcagt

SEQ ID NO: 63286 - DNA, 22 bp, synthetic construct
  misc_feature 1..22: note = chemically synthesized
  source 1..22: mol_type = other DNA
tctcctaggctgcaatgcagtg

SEQ ID NO: 63287 - DNA, 22 bp, synthetic construct
  misc_feature 1..22: note = chemically synthesized
  source 1..22: mol_type = other DNA
ctaggctgcaatgcagtgccat

SEQ ID NO: 63288 - DNA, 22 bp, synthetic construct
  misc_feature 1..22: note = chemically synthesized
  source 1..22: mol_type = other DNA
ggctgcaatgcagtgccatgat

SEQ ID NO: 63289 - DNA, 22 bp, synthetic construct
  misc_feature 1..22: note = chemically synthesized
  source 1..22: mol_type = other DNA
caatgcagtgccatgatcatag

SEQ ID NO: 63290 - DNA, 22 bp, synthetic construct
  misc_feature 1..22: note = chemically synthesized
  source 1..22: mol_type = other DNA
actgcagcctcgacctcctgga

SEQ ID NO: 63291 - DNA, 22 bp, synthetic construct
  misc_feature 1..22: note = chemically synthesized
  source 1..22: mol_type = other DNA
cagcctcgacctcctggactca

SEQ ID NO: 63292 - DNA, 22 bp, synthetic construct
  misc_feature 1..22: note = chemically synthesized
  source 1..22: mol_type = other DNA
gacctcctggactcaagcaatc

SEQ ID NO: 63293 - DNA, 22 bp, synthetic construct
  misc_feature 1..22: note = chemically synthesized
  source 1..22: mol_type = other DNA
ctggactcaagcaatcctccca

SEQ ID NO: 63294 - DNA, 22 bp, synthetic construct
  misc_feature 1..22: note = chemically synthesized
  source 1..22: mol_type = other DNA
gactcaagcaatcctcccacct

SEQ ID NO: 63295 - DNA, 22 bp, synthetic construct
  misc_feature 1..22: note = chemically synthesized
  source 1..22: mol_type = other DNA
aagcaatcctcccacctcagcc

SEQ ID NO: 63296 - DNA, 22 bp, synthetic construct
  misc_feature 1..22: note = chemically synthesized
  source 1..22: mol_type = other DNA
ccacctcagccccctgagtagc

SEQ ID NO: 63297 - DNA, 22 bp, synthetic construct
  misc_feature 1..22: note = chemically synthesized
  source 1..22: mol_type = other DNA
agccccctgagtagctgggacc

SEQ ID NO: 63298 - DNA, 22 bp, synthetic construct
  misc_feature 1..22: note = chemically synthesized
  source 1..22: mol_type = other DNA
agtagctgggaccacaggtgca

SEQ ID NO: 63299 - DNA, 22 bp, synthetic construct
  misc_feature 1..22: note = chemically synthesized
  source 1..22: mol_type = other DNA
ggaccacaggtgcacaccacca

SEQ ID NO: 63300 - DNA, 22 bp, synthetic construct
  misc_feature 1..22: note = chemically synthesized
  source 1..22: mol_type = other DNA
tttaaatgtgttttgtttgttt

SEQ ID NO: 63301 - DNA, 22 bp, synthetic construct
  misc_feature 1..22: note = chemically synthesized
  source 1..22: mol_type = other DNA
ttaaatgtgttttgtttgtttg

SEQ ID NO: 63302 - DNA, 22 bp, synthetic construct
  misc_feature 1..22: note = chemically synthesized
  source 1..22: mol_type = other DNA
taaatgtgttttgtttgtttgt

SEQ ID NO: 63303 - DNA, 22 bp, synthetic construct
  misc_feature 1..22: note = chemically synthesized
  source 1..22: mol_type = other DNA
aaatgtgttttgtttgtttgtt

SEQ ID NO: 63304 - DNA, 22 bp, synthetic construct
  misc_feature 1..22: note = chemically synthesized
  source 1..22: mol_type = other DNA
aatgtgttttgtttgtttgttt

SEQ ID NO: 63305 - DNA, 22 bp, synthetic construct
  misc_feature 1..22: note = chemically synthesized
  source 1..22: mol_type = other DNA
tgtttgtttgtttgattgtttt

SEQ ID NO: 63306 - DNA, 22 bp, synthetic construct
  misc_feature 1..22: note = chemically synthesized
  source 1..22: mol_type = other DNA
gtttgtttgtttgattgttttt

SEQ ID NO: 63307 - DNA, 22 bp, synthetic construct
  misc_feature 1..22: note = chemically synthesized
  source 1..22: mol_type = other DNA
tttgtttgtttgattgtttttg

SEQ ID NO: 63308 - DNA, 22 bp, synthetic construct
  misc_feature 1..22: note = chemically synthesized
  source 1..22: mol_type = other DNA
gtttgtttgattgtttttgccc

SEQ ID NO: 63309 - DNA, 22 bp, synthetic construct
  misc_feature 1..22: note = chemically synthesized
  source 1..22: mol_type = other DNA
tttgtttgattgtttttgccca

SEQ ID NO: 63310 - DNA, 22 bp, synthetic construct
  misc_feature 1..22: note = chemically synthesized
  source 1..22: mol_type = other DNA
gtttgattgtttttgcccaggc

SEQ ID NO: 63311 - DNA, 22 bp, synthetic construct
  misc_feature 1..22: note = chemically synthesized
  source 1..22: mol_type = other DNA
tttgattgtttttgcccaggct

SEQ ID NO: 63312 - DNA, 22 bp, synthetic construct
  misc_feature 1..22: note = chemically synthesized
  source 1..22: mol_type = other DNA
gattgtttttgcccaggctggt

SEQ ID NO: 63313 - DNA, 22 bp, synthetic construct
  misc_feature 1..22: note = chemically synthesized
  source 1..22: mol_type = other DNA
attgtttttgcccaggctggtt

SEQ ID NO: 63314 - DNA, 22 bp, synthetic construct
  misc_feature 1..22: note = chemically synthesized
  source 1..22: mol_type = other DNA
tttttgcccaggctggttttga

SEQ ID NO: 63315 - DNA, 22 bp, synthetic construct
  misc_feature 1..22: note = chemically synthesized
  source 1..22: mol_type = other DNA
ttgcccaggctggttttgaact

SEQ ID NO: 63316 - DNA, 22 bp, synthetic construct
  misc_feature 1..22: note = chemically synthesized
  source 1..22: mol_type = other DNA
tgcccaggctggttttgaactc

SEQ ID NO: 63317 - DNA, 22 bp, synthetic construct
  misc_feature 1..22: note = chemically synthesized
  source 1..22: mol_type = other DNA
gcccaggctggttttgaactct

SEQ ID NO: 63318 - DNA, 22 bp, synthetic construct
  misc_feature 1..22: note = chemically synthesized
  source 1..22: mol_type = other DNA
cccaggctggttttgaactctt

SEQ ID NO: 63319 - DNA, 22 bp, synthetic construct
  misc_feature 1..22: note = chemically synthesized
  source 1..22: mol_type = other DNA
gttttgaactcttgggctcaag

SEQ ID NO: 63320 - DNA, 22 bp, synthetic construct
  misc_feature 1..22: note = chemically synthesized
  source 1..22: mol_type = other DNA
tgaactcttgggctcaagcaat

SEQ ID NO: 63321 - DNA, 22 bp, synthetic construct
  misc_feature 1..22: note = chemically synthesized
  source 1..22: mol_type = other DNA
gaactcttgggctcaagcaatc

SEQ ID NO: 63322 - DNA, 22 bp, synthetic construct
  misc_feature 1..22: note = chemically synthesized
  source 1..22: mol_type = other DNA
aactcttgggctcaagcaatcc

SEQ ID NO: 63323 - DNA, 22 bp, synthetic construct
  misc_feature 1..22: note = chemically synthesized
  source 1..22: mol_type = other DNA
ttgggctcaagcaatcctccta

SEQ ID NO: 63324 - DNA, 22 bp, synthetic construct
  misc_feature 1..22: note = chemically synthesized
  source 1..22: mol_type = other DNA
gggctcaagcaatcctcctacc

SEQ ID NO: 63325 - DNA, 22 bp, synthetic construct
  misc_feature 1..22: note = chemically synthesized
  source 1..22: mol_type = other DNA
ggctcaagcaatcctcctaccc

SEQ ID NO: 63326 - DNA, 22 bp, synthetic construct
  misc_feature 1..22: note = chemically synthesized
  source 1..22: mol_type = other DNA
aagcaatcctcctacccttggc

SEQ ID NO: 63327 - DNA, 22 bp, synthetic construct
  misc_feature 1..22: note = chemically synthesized
  source 1..22: mol_type = other DNA
ctacccttggcctcccaaagtg

SEQ ID NO: 63328 - DNA, 22 bp, synthetic construct
  misc_feature 1..22: note = chemically synthesized
  source 1..22: mol_type = other DNA
cccttggcctcccaaagtgttg

SEQ ID NO: 63329 - DNA, 22 bp, synthetic construct
  misc_feature 1..22: note = chemically synthesized
  source 1..22: mol_type = other DNA
ggcctcccaaagtgttgggatt

SEQ ID NO: 63330 - DNA, 22 bp, synthetic construct
  misc_feature 1..22: note = chemically synthesized
  source 1..22: mol_type = other DNA
gcctcccaaagtgttgggatta

SEQ ID NO: 63331 - DNA, 22 bp, synthetic construct
  misc_feature 1..22: note = chemically synthesized
  source 1..22: mol_type = other DNA
ccaaagtgttgggattataggt

SEQ ID NO: 63332 - DNA, 22 bp, synthetic construct
  misc_feature 1..22: note = chemically synthesized
  source 1..22: mol_type = other DNA
ggattataggtgtgagccacca

SEQ ID NO: 63333 - DNA, 22 bp, synthetic construct
  misc_feature 1..22: note = chemically synthesized
  source 1..22: mol_type = other DNA
taggtgtgagccaccatggccc

SEQ ID NO: 63334 - DNA, 22 bp, synthetic construct
  misc_feature 1..22: note = chemically synthesized
  source 1..22: mol_type = other DNA
gttcccatcccattcttaattc

SEQ ID NO: 63335 - DNA, 22 bp, synthetic construct
  misc_feature 1..22: note = chemically synthesized
  source 1..22: mol_type = other DNA
ccatcccattcttaattcctct

SEQ ID NO: 63336 - DNA, 22 bp, synthetic construct
  misc_feature 1..22: note = chemically synthesized
  source 1..22: mol_type = other DNA
ttaattcctctaccctgagaga

SEQ ID NO: 63337 - DNA, 22 bp, synthetic construct
  misc_feature 1..22: note = chemically synthesized
  source 1..22: mol_type = other DNA
aattcctctaccctgagagata

SEQ ID NO: 63338 - DNA, 22 bp, synthetic construct
  misc_feature 1..22: note = chemically synthesized
  source 1..22: mol_type = other DNA
attcctctaccctgagagatag

SEQ ID NO: 63339 - DNA, 22 bp, synthetic construct
  misc_feature 1..22: note = chemically synthesized
  source 1..22: mol_type = other DNA
ctctaccctgagagatagaggg

SEQ ID NO: 63340 - DNA, 22 bp, synthetic construct
  misc_feature 1..22: note = chemically synthesized
  source 1..22: mol_type = other DNA
taccctgagagatagagggtcc

SEQ ID NO: 63341 - DNA, 22 bp, synthetic construct
  misc_feature 1..22: note = chemically synthesized
  source 1..22: mol_type = other DNA
ccctgagagatagagggtcctg

SEQ ID NO: 63342 - DNA, 22 bp, synthetic construct
  misc_feature 1..22: note = chemically synthesized
  source 1..22: mol_type = other DNA
agagatagagggtcctgagatg

SEQ ID NO: 63343 - DNA, 22 bp, synthetic construct
  misc_feature 1..22: note = chemically synthesized
  source 1..22: mol_type = other DNA
agatgtgccgcccagacctccc

SEQ ID NO: 63344 - DNA, 22 bp, synthetic construct
  misc_feature 1..22: note = chemically synthesized
  source 1..22: mol_type = other DNA
cctcctgaactgcaggacttat

SEQ ID NO: 63345 - DNA, 22 bp, synthetic construct
  misc_feature 1..22: note = chemically synthesized
  source 1..22: mol_type = other DNA
ctgaactgcaggacttatttcg

SEQ ID NO: 63346 - DNA, 22 bp, synthetic construct
  misc_feature 1..22: note = chemically synthesized
  source 1..22: mol_type = other DNA
aactgcaggacttatttcgtag

SEQ ID NO: 63347 - DNA, 22 bp, synthetic construct
  misc_feature 1..22: note = chemically synthesized
  source 1..22: mol_type = other DNA
caggacttatttcgtagctgtt

SEQ ID NO: 63348 - DNA, 22 bp, synthetic construct
  misc_feature 1..22: note = chemically synthesized
  source 1..22: mol_type = other DNA
atttcgtagctgttgagagtgt

SEQ ID NO: 63349 - DNA, 22 bp, synthetic construct
  misc_feature 1..22: note = chemically synthesized
  source 1..22: mol_type = other DNA
tttcgtagctgttgagagtgtg

SEQ ID NO: 63350 - DNA, 22 bp, synthetic construct
  misc_feature 1..22: note = chemically synthesized
  source 1..22: mol_type = other DNA
cgtagctgttgagagtgtgatg

SEQ ID NO: 63351 - DNA, 22 bp, synthetic construct
  misc_feature 1..22: note = chemically synthesized
  source 1..22: mol_type = other DNA
gtagctgttgagagtgtgatgg

SEQ ID NO: 63352 - DNA, 22 bp, synthetic construct
  misc_feature 1..22: note = chemically synthesized
  source 1..22: mol_type = other DNA
ttgagagtgtgatggtagatgg

SEQ ID NO: 63353 - DNA, 22 bp, synthetic construct
  misc_feature 1..22: note = chemically synthesized
  source 1..22: mol_type = other DNA
agagtgtgatggtagatggctt

SEQ ID NO: 63354 - DNA, 22 bp, synthetic construct
  misc_feature 1..22: note = chemically synthesized
  source 1..22: mol_type = other DNA
tctgctctcagccttctcctgg

SEQ ID NO: 63355 - DNA, 22 bp, synthetic construct
  misc_feature 1..22: note = chemically synthesized
  source 1..22: mol_type = other DNA
ctgctctcagccttctcctggc

SEQ ID NO: 63356 - DNA, 22 bp, synthetic construct
  misc_feature 1..22: note = chemically synthesized
  source 1..22: mol_type = other DNA
tgctctcagccttctcctggca

SEQ ID NO: 63357 - DNA, 22 bp, synthetic construct
  misc_feature 1..22: note = chemically synthesized
  source 1..22: mol_type = other DNA
ctctcagccttctcctggcatt

SEQ ID NO: 63358 - DNA, 22 bp, synthetic construct
  misc_feature 1..22: note = chemically synthesized
  source 1..22: mol_type = other DNA
tcagccttctcctggcattgcc

SEQ ID NO: 63359 - DNA, 22 bp, synthetic construct
  misc_feature 1..22: note = chemically synthesized
  source 1..22: mol_type = other DNA
agccttctcctggcattgccct

SEQ ID NO: 63360 - DNA, 22 bp, synthetic construct
  misc_feature 1..22: note = chemically synthesized
  source 1..22: mol_type = other DNA
ctcctggcattgccctgggcta

SEQ ID NO: 63361 - DNA, 22 bp, synthetic construct
  misc_feature 1..22: note = chemically synthesized
  source 1..22: mol_type = other DNA
tcctggcattgccctgggctaa

SEQ ID NO: 63362 - DNA, 22 bp, synthetic construct
  misc_feature 1..22: note = chemically synthesized
  source 1..22: mol_type = other DNA
ctggcattgccctgggctaaag

SEQ ID NO: 63363 - DNA, 22 bp, synthetic construct
  misc_feature 1..22: note = chemically synthesized
  source 1..22: mol_type = other DNA
gcattgccctgggctaaagaga

SEQ ID NO: 63364 - DNA, 22 bp, synthetic construct
  misc_feature 1..22: note = chemically synthesized
  source 1..22: mol_type = other DNA
ccctgggctaaagagagtcgcc

SEQ ID NO: 63365 - DNA, 22 bp, synthetic construct
  misc_feature 1..22: note = chemically synthesized
  source 1..22: mol_type = other DNA
ggctaaagagagtcgccttgat

SEQ ID NO: 63366 - DNA, 22 bp, synthetic construct
  misc_feature 1..22: note = chemically synthesized
  source 1..22: mol_type = other DNA
aagagagtcgccttgatcaagg

SEQ ID NO: 63367 - DNA, 22 bp, synthetic construct
  misc_feature 1..22: note = chemically synthesized
  source 1..22: mol_type = other DNA
gatcaaggttacgctctcccca

SEQ ID NO: 63368 - DNA, 22 bp, synthetic construct
  misc_feature 1..22: note = chemically synthesized
  source 1..22: mol_type = other DNA
atcaaggttacgctctccccag

SEQ ID NO: 63369 - DNA, 22 bp, synthetic construct
  misc_feature 1..22: note = chemically synthesized
  source 1..22: mol_type = other DNA
cgctctccccagggtctgattc

SEQ ID NO: 63370 - DNA, 22 bp, synthetic construct
  misc_feature 1..22: note = chemically synthesized
  source 1..22: mol_type = other DNA
tccccagggtctgattcccttg

SEQ ID NO: 63371 - DNA, 22 bp, synthetic construct
  misc_feature 1..22: note = chemically synthesized
  source 1..22: mol_type = other DNA
cccagggtctgattcccttgtc

SEQ ID NO: 63372 - DNA, 22 bp, synthetic construct
  misc_feature 1..22: note = chemically synthesized
  source 1..22: mol_type = other DNA
attcccttgtcccaacttggac

SEQ ID NO: 63373 - DNA, 22 bp, synthetic construct
  misc_feature 1..22: note = chemically synthesized
  source 1..22: mol_type = other DNA
ccttgtcccaacttggaccaac

SEQ ID NO: 63374 - DNA, 22 bp, synthetic construct
  misc_feature 1..22: note = chemically synthesized
  source 1..22: mol_type = other DNA
gtcccaacttggaccaactctg

SEQ ID NO: 63375 - DNA, 22 bp, synthetic construct
  misc_feature 1..22: note = chemically synthesized
  source 1..22: mol_type = other DNA
tcccaacttggaccaactctga

SEQ ID NO: 63376 - DNA, 22 bp, synthetic construct
  misc_feature 1..22: note = chemically synthesized
  source 1..22: mol_type = other DNA
ggaccaactctgaggagccatc

SEQ ID NO: 63377 - DNA, 22 bp, synthetic construct
  misc_feature 1..22: note = chemically synthesized
  source 1..22: mol_type = other DNA
gaccaactctgaggagccatcc

SEQ ID NO: 63378 - DNA, 22 bp, synthetic construct
  misc_feature 1..22: note = chemically synthesized
  source 1..22: mol_type = other DNA
tgaggagccatccccagcttca

SEQ ID NO: 63379 - DNA, 22 bp, synthetic construct
  misc_feature 1..22: note = chemically synthesized
  source 1..22: mol_type = other DNA
aggagccatccccagcttcaga

SEQ ID NO: 63380 - DNA, 22 bp, synthetic construct
  misc_feature 1..22: note = chemically synthesized
  source 1..22: mol_type = other DNA
cagagctcgctgtggggttgga

SEQ ID NO: 63381 - DNA, 22 bp, synthetic construct
  misc_feature 1..22: note = chemically synthesized
  source 1..22: mol_type = other DNA
agagctcgctgtggggttggat

SEQ ID NO: 63382 - DNA, 22 bp, synthetic construct
  misc_feature 1..22: note = chemically synthesized
  source 1..22: mol_type = other DNA
gctgtggggttggatgaggcag

SEQ ID NO: 63383 - DNA, 22 bp, synthetic construct
  misc_feature 1..22: note = chemically synthesized
  source 1..22: mol_type = other DNA
tggggttggatgaggcagaatc

SEQ ID NO: 63384 - DNA, 22 bp, synthetic construct
  misc_feature 1..22: note = chemically synthesized
  source 1..22: mol_type = other DNA
gatgaggcagaatcacaaccgg

SEQ ID NO: 63385 - DNA, 22 bp, synthetic construct
  misc_feature 1..22: note = chemically synthesized
  source 1..22: mol_type = other DNA
tccttctgccctgttcctgttc

SEQ ID NO: 63386 - DNA, 22 bp, synthetic construct
  misc_feature 1..22: note = chemically synthesized
  source 1..22: mol_type = other DNA
cttctgccctgttcctgttcct

SEQ ID NO: 63387 - DNA, 22 bp, synthetic construct
  misc_feature 1..22: note = chemically synthesized
  source 1..22: mol_type = other DNA
ctgccctgttcctgttccttcc

SEQ ID NO: 63388 - DNA, 22 bp, synthetic construct
  misc_feature 1..22: note = chemically synthesized
  source 1..22: mol_type = other DNA
tgccctgttcctgttccttccc

SEQ ID NO: 63389 - DNA, 22 bp, synthetic construct
  misc_feature 1..22: note = chemically synthesized
  source 1..22: mol_type = other DNA
ccctgttcctgttccttccctt

SEQ ID NO: 63390 - DNA, 22 bp, synthetic construct
  misc_feature 1..22: note = chemically synthesized
  source 1..22: mol_type = other DNA
ttcctgttccttcccttctaca

SEQ ID NO: 63391 - DNA, 22 bp, synthetic construct
  misc_feature 1..22: note = chemically synthesized
  source 1..22: mol_type = other DNA
ctgttccttcccttctacaagt

SEQ ID NO: 63392 - DNA, 22 bp, synthetic construct
  misc_feature 1..22: note = chemically synthesized
  source 1..22: mol_type = other DNA
ttccttcccttctacaagtata

SEQ ID NO: 63393 - DNA, 22 bp, synthetic construct
  misc_feature 1..22: note = chemically synthesized
  source 1..22: mol_type = other DNA
cttcccttctacaagtatagtt

SEQ ID NO: 63394 - DNA, 22 bp, synthetic construct
  misc_feature 1..22: note = chemically synthesized
  source 1..22: mol_type = other DNA
cccttctacaagtatagttccc

SEQ ID NO: 63395 - DNA, 22 bp, synthetic construct
  misc_feature 1..22: note = chemically synthesized
  source 1..22: mol_type = other DNA
ccttctacaagtatagttcccc

SEQ ID NO: 63396 - DNA, 22 bp, synthetic construct
  misc_feature 1..22: note = chemically synthesized
  source 1..22: mol_type = other DNA
ctacaagtatagttccccagag

SEQ ID NO: 63397 - DNA, 22 bp, synthetic construct
  misc_feature 1..22: note = chemically synthesized
  source 1..22: mol_type = other DNA
tacaagtatagttccccagagt

SEQ ID NO: 63398 - DNA, 22 bp, synthetic construct
  misc_feature 1..22: note = chemically synthesized
  source 1..22: mol_type = other DNA
caagtatagttccccagagtat

SEQ ID NO: 63399 - DNA, 22 bp, synthetic construct
  misc_feature 1..22: note = chemically synthesized
  source 1..22: mol_type = other DNA
cccagagtatctaaactcctgc

SEQ ID NO: 63400 - DNA, 22 bp, synthetic construct
  misc_feature 1..22: note = chemically synthesized
  source 1..22: mol_type = other DNA
aactcctgcacgtgaatctcca

SEQ ID NO: 63401 - DNA, 22 bp, synthetic construct
  misc_feature 1..22: note = chemically synthesized
  source 1..22: mol_type = other DNA
ctgcacgtgaatctccatttca

SEQ ID NO: 63402 - DNA, 22 bp, synthetic construct
  misc_feature 1..22: note = chemically synthesized
  source 1..22: mol_type = other DNA
cacgtgaatctccatttcagcc

SEQ ID NO: 63403 - DNA, 22 bp, synthetic construct
  misc_feature 1..22: note = chemically synthesized
  source 1..22: mol_type = other DNA
catttcagcctgctttccaggg

SEQ ID NO: 63404 - DNA, 22 bp, synthetic construct
  misc_feature 1..22: note = chemically synthesized
  source 1..22: mol_type = other DNA
cagcctgctttccagggaaccc

SEQ ID NO: 63405 - DNA, 22 bp, synthetic construct
  misc_feature 1..22: note = chemically synthesized
  source 1..22: mol_type = other DNA
agcctgctttccagggaacccc

SEQ ID NO: 63406 - DNA, 22 bp, synthetic construct
  misc_feature 1..22: note = chemically synthesized
  source 1..22: mol_type = other DNA
ctttccagggaaccccatagat

SEQ ID NO: 63407 - DNA, 22 bp, synthetic construct
  misc_feature 1..22: note = chemically synthesized
  source 1..22: mol_type = other DNA
tccagggaaccccatagataaa

SEQ ID NO: 63408 - DNA, 22 bp, synthetic construct
  misc_feature 1..22: note = chemically synthesized
  source 1..22: mol_type = other DNA
ccagggaaccccatagataaat

SEQ ID NO: 63409 - DNA, 22 bp, synthetic construct
  misc_feature 1..22: note = chemically synthesized
  source 1..22: mol_type = other DNA
cagggaaccccatagataaata

SEQ ID NO: 63410 - DNA, 22 bp, synthetic construct
  misc_feature 1..22: note = chemically synthesized
  source 1..22: mol_type = other DNA
tcttccctccctcccttcctcc

SEQ ID NO: 63411 - DNA, 22 bp, synthetic construct
  misc_feature 1..22: note = chemically synthesized
  source 1..22: mol_type = other DNA
cttccctccctcccttcctcct

SEQ ID NO: 63412 - DNA, 22 bp, synthetic construct
  misc_feature 1..22: note = chemically synthesized
  source 1..22: mol_type = other DNA
ttccctccctcccttcctcctt

SEQ ID NO: 63413 - DNA, 22 bp, synthetic construct
  misc_feature 1..22: note = chemically synthesized
  source 1..22: mol_type = other DNA
ccctccctcccttcctccttcc

SEQ ID NO: 63414 - DNA, 22 bp, synthetic construct
  misc_feature 1..22: note = chemically synthesized
  source 1..22: mol_type = other DNA
cctccctcccttcctccttccc

SEQ ID NO: 63415 - DNA, 22 bp, synthetic construct
  misc_feature 1..22: note = chemically synthesized
  source 1..22: mol_type = other DNA
cctcccttcctccttccctttc

SEQ ID NO: 63416 - DNA, 22 bp, synthetic construct
  misc_feature 1..22: note = chemically synthesized
  source 1..22: mol_type = other DNA
ccttcctccttccctttctttc

SEQ ID NO: 63417 - DNA, 22 bp, synthetic construct
  misc_feature 1..22: note = chemically synthesized
  source 1..22: mol_type = other DNA
cctccttccctttctttctccc

SEQ ID NO: 63418 - DNA, 22 bp, synthetic construct
  misc_feature 1..22: note = chemically synthesized
  source 1..22: mol_type = other DNA
ctccttccctttctttctccct

SEQ ID NO: 63419 - DNA, 22 bp, synthetic construct
  misc_feature 1..22: note = chemically synthesized
  source 1..22: mol_type = other DNA
cttccctttctttctcccttcc

SEQ ID NO: 63420 - DNA, 22 bp, synthetic construct
  misc_feature 1..22: note = chemically synthesized
  source 1..22: mol_type = other DNA
ccctttctttctcccttccttc

SEQ ID NO: 63421 - DNA, 22 bp, synthetic construct
  misc_feature 1..22: note = chemically synthesized
  source 1..22: mol_type = other DNA
cctttctttctcccttccttcc

SEQ ID NO: 63422 - DNA, 22 bp, synthetic construct
  misc_feature 1..22: note = chemically synthesized
  source 1..22: mol_type = other DNA
tctttctcccttccttcctccc

SEQ ID NO: 63423 - DNA, 22 bp, synthetic construct
  misc_feature 1..22: note = chemically synthesized
  source 1..22: mol_type = other DNA
ctttctcccttccttcctccct

SEQ ID NO: 63424 - DNA, 22 bp, synthetic construct
  misc_feature 1..22: note = chemically synthesized
  source 1..22: mol_type = other DNA
tttctcccttccttcctccctc

SEQ ID NO: 63425 - DNA, 22 bp, synthetic construct
  misc_feature 1..22: note = chemically synthesized
  source 1..22: mol_type = other DNA
tctcccttccttcctccctccc

SEQ ID NO: 63426 - DNA, 22 bp, synthetic construct
  misc_feature 1..22: note = chemically synthesized
  source 1..22: mol_type = other DNA
ctcccttccttcctccctccct

SEQ ID NO: 63427 - DNA, 22 bp, synthetic construct
  misc_feature 1..22: note = chemically synthesized
  source 1..22: mol_type = other DNA
tcccttccttcctccctccctt

SEQ ID NO: 63428 - DNA, 22 bp, synthetic construct
  misc_feature 1..22: note = chemically synthesized
  source 1..22: mol_type = other DNA
ccttccttcctccctcccttct

SEQ ID NO: 63429 - DNA, 22 bp, synthetic construct
  misc_feature 1..22: note = chemically synthesized
  source 1..22: mol_type = other DNA
ccttcctccctcccttcttctt

SEQ ID NO: 63430 - DNA, 22 bp, synthetic construct
  misc_feature 1..22: note = chemically synthesized
  source 1..22: mol_type = other DNA
cttcctccctcccttcttcttc

SEQ ID NO: 63431 - DNA, 22 bp, synthetic construct
  misc_feature 1..22: note = chemically synthesized
  source 1..22: mol_type = other DNA
cctccctcccttcttcttcctt

SEQ ID NO: 63432 - DNA, 22 bp, synthetic construct
  misc_feature 1..22: note = chemically synthesized
  source 1..22: mol_type = other DNA
ctccctcccttcttcttccttc

SEQ ID NO: 63433 - DNA, 22 bp, synthetic construct
  misc_feature 1..22: note = chemically synthesized
  source 1..22: mol_type = other DNA
cctcccttcttcttccttctaa

SEQ ID NO: 63434 - DNA, 22 bp, synthetic construct
  misc_feature 1..22: note = chemically synthesized
  source 1..22: mol_type = other DNA
ccttcttcttccttctaacact

SEQ ID NO: 63435 - DNA, 22 bp, synthetic construct
  misc_feature 1..22: note = chemically synthesized
  source 1..22: mol_type = other DNA
cttcttccttctaacactaaca

SEQ ID NO: 63436 - DNA, 22 bp, synthetic construct
  misc_feature 1..22: note = chemically synthesized
  source 1..22: mol_type = other DNA
ttcttccttctaacactaacaa

SEQ ID NO: 63437 - DNA, 22 bp, synthetic construct
  misc_feature 1..22: note = chemically synthesized
  source 1..22: mol_type = other DNA
cttccttctaacactaacaatt

SEQ ID NO: 63438 - DNA, 22 bp, synthetic construct
  misc_feature 1..22: note = chemically synthesized
  source 1..22: mol_type = other DNA
ttccttctaacactaacaatta

SEQ ID NO: 63439 - DNA, 22 bp, synthetic construct
  misc_feature 1..22: note = chemically synthesized
  source 1..22: mol_type = other DNA
ccttctaacactaacaattata

SEQ ID NO: 63440 - DNA, 22 bp, synthetic construct
  misc_feature 1..22: note = chemically synthesized
  source 1..22: mol_type = other DNA
cttctaacactaacaattatat

SEQ ID NO: 63441 - DNA, 22 bp, synthetic construct
  misc_feature 1..22: note = chemically synthesized
  source 1..22: mol_type = other DNA
ctaacactaacaattatatacc

SEQ ID NO: 63442 - DNA, 22 bp, synthetic construct
  misc_feature 1..22: note = chemically synthesized
  source 1..22: mol_type = other DNA
taacactaacaattatatacct

SEQ ID NO: 63443 - DNA, 22 bp, synthetic construct
  misc_feature 1..22: note = chemically synthesized
  source 1..22: mol_type = other DNA
acactaacaattatataccttg

SEQ ID NO: 63444 - DNA, 22 bp, synthetic construct
  misc_feature 1..22: note = chemically synthesized
  source 1..22: mol_type = other DNA
acaattatataccttgggtaat

SEQ ID NO: 63445 - DNA, 22 bp, synthetic construct
  misc_feature 1..22: note = chemically synthesized
  source 1..22: mol_type = other DNA
tataccttgggtaattcattta

SEQ ID NO: 63446 - DNA, 22 bp, synthetic construct
  misc_feature 1..22: note = chemically synthesized
  source 1..22: mol_type = other DNA
gggtaattcatttaaacttttt

SEQ ID NO: 63447 - DNA, 22 bp, synthetic construct
  misc_feature 1..22: note = chemically synthesized
  source 1..22: mol_type = other DNA
ggtaattcatttaaactttttt

SEQ ID NO: 63448 - DNA, 22 bp, synthetic construct
  misc_feature 1..22: note = chemically synthesized
  source 1..22: mol_type = other DNA
atttaaactttttttttttttt

SEQ ID NO: 63449 - DNA, 22 bp, synthetic construct
  misc_feature 1..22: note = chemically synthesized
  source 1..22: mol_type = other DNA
aaacttttttttttttttcctg

SEQ ID NO: 63450 - DNA, 22 bp, synthetic construct
  misc_feature 1..22: note = chemically synthesized
  source 1..22: mol_type = other DNA
aacttttttttttttttcctga

SEQ ID NO: 63451 - DNA, 22 bp, synthetic construct
  misc_feature 1..22: note = chemically synthesized
  source 1..22: mol_type = other DNA
ttttttttttttcctgacagaa

SEQ ID NO: 63452 - DNA, 22 bp, synthetic construct
  misc_feature 1..22: note = chemically synthesized
  source 1..22: mol_type = other DNA
tttttttttttcctgacagaat

SEQ ID NO: 63453 - DNA, 22 bp, synthetic construct
  misc_feature 1..22: note = chemically synthesized
  source 1..22: mol_type = other DNA
ttttttttttcctgacagaatc

SEQ ID NO: 63454 - DNA, 22 bp, synthetic construct
  misc_feature 1..22: note = chemically synthesized
  source 1..22: mol_type = other DNA
tttttttttcctgacagaatct

SEQ ID NO: 63455 - DNA, 22 bp, synthetic construct
  misc_feature 1..22: note = chemically synthesized
  source 1..22: mol_type = other DNA
ttttttttcctgacagaatctt

SEQ ID NO: 63456 - DNA, 22 bp, synthetic construct
  misc_feature 1..22: note = chemically synthesized
  source 1..22: mol_type = other DNA
tttttttcctgacagaatcttt

SEQ ID NO: 63457 - DNA, 22 bp, synthetic construct
  misc_feature 1..22: note = chemically synthesized
  source 1..22: mol_type = other DNA
ttttttcctgacagaatctttc

SEQ ID NO: 63458 - DNA, 22 bp, synthetic construct
  misc_feature 1..22: note = chemically synthesized
  source 1..22: mol_type = other DNA
tttttcctgacagaatctttct

SEQ ID NO: 63459 - DNA, 22 bp, synthetic construct
  misc_feature 1..22: note = chemically synthesized
  source 1..22: mol_type = other DNA
ttttcctgacagaatctttctc

SEQ ID NO: 63460 - DNA, 22 bp, synthetic construct
  misc_feature 1..22: note = chemically synthesized
  source 1..22: mol_type = other DNA
tttcctgacagaatctttctct

SEQ ID NO: 63461 - DNA, 22 bp, synthetic construct
  misc_feature 1..22: note = chemically synthesized
  source 1..22: mol_type = other DNA
ttcctgacagaatctttctctg

SEQ ID NO: 63462 - DNA, 22 bp, synthetic construct
  misc_feature 1..22: note = chemically synthesized
  source 1..22: mol_type = other DNA
tcctgacagaatctttctctgt

SEQ ID NO: 63463 - DNA, 22 bp, synthetic construct
  misc_feature 1..22: note = chemically synthesized
  source 1..22: mol_type = other DNA
cctgacagaatctttctctgtc

SEQ ID NO: 63464 - DNA, 22 bp, synthetic construct
  misc_feature 1..22: note = chemically synthesized
  source 1..22: mol_type = other DNA
ctgacagaatctttctctgtca

SEQ ID NO: 63465 - DNA, 22 bp, synthetic construct
  misc_feature 1..22: note = chemically synthesized
  source 1..22: mol_type = other DNA
acagaatctttctctgtcacca

SEQ ID NO: 63466 - DNA, 22 bp, synthetic construct
  misc_feature 1..22: note = chemically synthesized
  source 1..22: mol_type = other DNA
tctctgtcaccaaggctggagt

SEQ ID NO: 63467 - DNA, 22 bp, synthetic construct
  misc_feature 1..22: note = chemically synthesized
  source 1..22: mol_type = other DNA
ctctgtcaccaaggctggagtg

SEQ ID NO: 63468 - DNA, 22 bp, synthetic construct
  misc_feature 1..22: note = chemically synthesized
  source 1..22: mol_type = other DNA
tctgtcaccaaggctggagtgc

SEQ ID NO: 63469 - DNA, 22 bp, synthetic construct
  misc_feature 1..22: note = chemically synthesized
  source 1..22: mol_type = other DNA
tgtcaccaaggctggagtgcag

SEQ ID NO: 63470 - DNA, 22 bp, synthetic construct
  misc_feature 1..22: note = chemically synthesized
  source 1..22: mol_type = other DNA
tcaccaaggctggagtgcagtg

SEQ ID NO: 63471 - DNA, 22 bp, synthetic construct
  misc_feature 1..22: note = chemically synthesized
  source 1..22: mol_type = other DNA
gagtgcagtggtgtgatttcag

SEQ ID NO: 63472 - DNA, 22 bp, synthetic construct
  misc_feature 1..22: note = chemically synthesized
  source 1..22: mol_type = other DNA
cagctcactgcaacctctgcct

SEQ ID NO: 63473 - DNA, 22 bp, synthetic construct
  misc_feature 1..22: note = chemically synthesized
  source 1..22: mol_type = other DNA
agctcactgcaacctctgcctc

SEQ ID NO: 63474 - DNA, 22 bp, synthetic construct
  misc_feature 1..22: note = chemically synthesized
  source 1..22: mol_type = other DNA
actgcaacctctgcctcccggg

SEQ ID NO: 63475 - DNA, 22 bp, synthetic construct
  misc_feature 1..22: note = chemically synthesized
  source 1..22: mol_type = other DNA
caacctctgcctcccgggttga

SEQ ID NO: 63476 - DNA, 22 bp, synthetic construct
  misc_feature 1..22: note = chemically synthesized
  source 1..22: mol_type = other DNA
tgcctcccgggttgaagtgatt

SEQ ID NO: 63477 - DNA, 22 bp, synthetic construct
  misc_feature 1..22: note = chemically synthesized
  source 1..22: mol_type = other DNA
cctcccgggttgaagtgattct

SEQ ID NO: 63478 - DNA, 22 bp, synthetic construct
  misc_feature 1..22: note = chemically synthesized
  source 1..22: mol_type = other DNA
ccgggttgaagtgattctcctg

SEQ ID NO: 63479 - DNA, 22 bp, synthetic construct
  misc_feature 1..22: note = chemically synthesized
  source 1..22: mol_type = other DNA
aagtgattctcctgccgcagcc

SEQ ID NO: 63480 - DNA, 22 bp, synthetic construct
  misc_feature 1..22: note = chemically synthesized
  source 1..22: mol_type = other DNA
tcctgccgcagcctcctgggta

SEQ ID NO: 63481 - DNA, 22 bp, synthetic construct
  misc_feature 1..22: note = chemically synthesized
  source 1..22: mol_type = other DNA
ctgccgcagcctcctgggtagc

SEQ ID NO: 63482 - DNA, 22 bp, synthetic construct
  misc_feature 1..22: note = chemically synthesized
  source 1..22: mol_type = other DNA
ccgcagcctcctgggtagctgg

SEQ ID NO: 63483 - DNA, 22 bp, synthetic construct
  misc_feature 1..22: note = chemically synthesized
  source 1..22: mol_type = other DNA
ctgggtagctgggattacaggc

SEQ ID NO: 63484 - DNA, 22 bp, synthetic construct
  misc_feature 1..22: note = chemically synthesized
  source 1..22: mol_type = other DNA
ggtagctgggattacaggcgcc

SEQ ID NO: 63485 - DNA, 22 bp, synthetic construct
  misc_feature 1..22: note = chemically synthesized
  source 1..22: mol_type = other DNA
ggattacaggcgcccgccacca

SEQ ID NO: 63486 - DNA, 22 bp, synthetic construct
  misc_feature 1..22: note = chemically synthesized
  source 1..22: mol_type = other DNA
caggcgcccgccaccatgcctg

SEQ ID NO: 63487 - DNA, 22 bp, synthetic construct
  misc_feature 1..22: note = chemically synthesized
  source 1..22: mol_type = other DNA
gctaagtttttgtattttttta

SEQ ID NO: 63488 - DNA, 22 bp, synthetic construct
  misc_feature 1..22: note = chemically synthesized
  source 1..22: mol_type = other DNA
agtttttgtatttttttattag

SEQ ID NO: 63489 - DNA, 22 bp, synthetic construct
  misc_feature 1..22: note = chemically synthesized
  source 1..22: mol_type = other DNA
ttgtatttttttattagtgacg

SEQ ID NO: 63490 - DNA, 22 bp, synthetic construct
  misc_feature 1..22: note = chemically synthesized
  source 1..22: mol_type = other DNA
tgtatttttttattagtgacga

SEQ ID NO: 63491 - DNA, 22 bp, synthetic construct
  misc_feature 1..22: note = chemically synthesized
  source 1..22: mol_type = other DNA
gtatttttttattagtgacgag

SEQ ID NO: 63492 - DNA, 22 bp, synthetic construct
  misc_feature 1..22: note = chemically synthesized
  source 1..22: mol_type = other DNA
tatttttttattagtgacgagg

SEQ ID NO: 63493 - DNA, 22 bp, synthetic construct
  misc_feature 1..22: note = chemically synthesized
  source 1..22: mol_type = other DNA
ttttattagtgacgaggtttca

SEQ ID NO: 63494 - DNA, 22 bp, synthetic construct
  misc_feature 1..22: note = chemically synthesized
  source 1..22: mol_type = other DNA
tttattagtgacgaggtttcac

SEQ ID NO: 63495 - DNA, 22 bp, synthetic construct
  misc_feature 1..22: note = chemically synthesized
  source 1..22: mol_type = other DNA
ttattagtgacgaggtttcacc

SEQ ID NO: 63496 - DNA, 22 bp, synthetic construct
  misc_feature 1..22: note = chemically synthesized
  source 1..22: mol_type = other DNA
tattagtgacgaggtttcacca

SEQ ID NO: 63497 - DNA, 22 bp, synthetic construct
  misc_feature 1..22: note = chemically synthesized
  source 1..22: mol_type = other DNA
attagtgacgaggtttcaccat

SEQ ID NO: 63498 - DNA, 22 bp, synthetic construct
  misc_feature 1..22: note = chemically synthesized
  source 1..22: mol_type = other DNA
ttagtgacgaggtttcaccatg

SEQ ID NO: 63499 - DNA, 22 bp, synthetic construct
  misc_feature 1..22: note = chemically synthesized
  source 1..22: mol_type = other DNA
gtgacgaggtttcaccatgttg

SEQ ID NO: 63500 - DNA, 22 bp, synthetic construct
  misc_feature 1..22: note = chemically synthesized
  source 1..22: mol_type = other DNA
caccatgttggccaggctggtc

SEQ ID NO: 63501 - DNA, 22 bp, synthetic construct
  misc_feature 1..22: note = chemically synthesized
  source 1..22: mol_type = other DNA
accatgttggccaggctggtct

SEQ ID NO: 63502 - DNA, 22 bp, synthetic construct
  misc_feature 1..22: note = chemically synthesized
  source 1..22: mol_type = other DNA
gccaggctggtctcaaactcct

SEQ ID NO: 63503 - DNA, 22 bp, synthetic construct
  misc_feature 1..22: note = chemically synthesized
  source 1..22: mol_type = other DNA
gtctcaaactcctgacctcagg

SEQ ID NO: 63504 - DNA, 22 bp, synthetic construct
  misc_feature 1..22: note = chemically synthesized
  source 1..22: mol_type = other DNA
aaactcctgacctcaggtgatc

SEQ ID NO: 63505 - DNA, 22 bp, synthetic construct
  misc_feature 1..22: note = chemically synthesized
  source 1..22: mol_type = other DNA
ctgacctcaggtgatccacctg

SEQ ID NO: 63506 - DNA, 22 bp, synthetic construct
  misc_feature 1..22: note = chemically synthesized
  source 1..22: mol_type = other DNA
acctcaggtgatccacctgcgt

SEQ ID NO: 63507 - DNA, 22 bp, synthetic construct
  misc_feature 1..22: note = chemically synthesized
  source 1..22: mol_type = other DNA
aggtgatccacctgcgttggcc

SEQ ID NO: 63508 - DNA, 22 bp, synthetic construct
  misc_feature 1..22: note = chemically synthesized
  source 1..22: mol_type = other DNA
cgttggcctcccaaagtgctag

SEQ ID NO: 63509 - DNA, 22 bp, synthetic construct
  misc_feature 1..22: note = chemically synthesized
  source 1..22: mol_type = other DNA
gcctcccaaagtgctaggatta

SEQ ID NO: 63510 - DNA, 22 bp, synthetic construct
  misc_feature 1..22: note = chemically synthesized
  source 1..22: mol_type = other DNA
ccaaagtgctaggattacaggc

SEQ ID NO: 63511 - DNA, 22 bp, synthetic construct
  misc_feature 1..22: note = chemically synthesized
  source 1..22: mol_type = other DNA
ggattacaggcgtgagccaccg

SEQ ID NO: 63512 - DNA, 22 bp, synthetic construct
  misc_feature 1..22: note = chemically synthesized
  source 1..22: mol_type = other DNA
caggcgtgagccaccgcgcccg

SEQ ID NO: 63513 - DNA, 22 bp, synthetic construct
  misc_feature 1..22: note = chemically synthesized
  source 1..22: mol_type = other DNA
ctttctgagccttagctactct

SEQ ID NO: 63514 - DNA, 22 bp, synthetic construct
  misc_feature 1..22: note = chemically synthesized
  source 1..22: mol_type = other DNA
tctgagccttagctactctacc

SEQ ID NO: 63515 - DNA, 22 bp, synthetic construct
  misc_feature 1..22: note = chemically synthesized
  source 1..22: mol_type = other DNA
ctgagccttagctactctacct

SEQ ID NO: 63516 - DNA, 22 bp, synthetic construct
  misc_feature 1..22: note = chemically synthesized
  source 1..22: mol_type = other DNA
tgagccttagctactctaccta

SEQ ID NO: 63517 - DNA, 22 bp, synthetic construct
  misc_feature 1..22: note = chemically synthesized
  source 1..22: mol_type = other DNA
agccttagctactctacctaag

SEQ ID NO: 63518 - DNA, 22 bp, synthetic construct
  misc_feature 1..22: note = chemically synthesized
  source 1..22: mol_type = other DNA
agctactctacctaaggagcag

SEQ ID NO: 63519 - DNA, 22 bp, synthetic construct
  misc_feature 1..22: note = chemically synthesized
  source 1..22: mol_type = other DNA
gctactctacctaaggagcaga

SEQ ID NO: 63520 - DNA, 22 bp, synthetic construct
  misc_feature 1..22: note = chemically synthesized
  source 1..22: mol_type = other DNA
ctctacctaaggagcagagata

SEQ ID NO: 63521 - DNA, 22 bp, synthetic construct
  misc_feature 1..22: note = chemically synthesized
  source 1..22: mol_type = other DNA
tacctaaggagcagagataata

SEQ ID NO: 63522 - DNA, 22 bp, synthetic construct
  misc_feature 1..22: note = chemically synthesized
  source 1..22: mol_type = other DNA
cctaaggagcagagataataat

SEQ ID NO: 63523 - DNA, 22 bp, synthetic construct
  misc_feature 1..22: note = chemically synthesized
  source 1..22: mol_type = other DNA
aggagcagagataataatttgc

SEQ ID NO: 63524 - DNA, 22 bp, synthetic construct
  misc_feature 1..22: note = chemically synthesized
  source 1..22: mol_type = other DNA
gcttctattaagacagaggact

SEQ ID NO: 63525 - DNA, 22 bp, synthetic construct
  misc_feature 1..22: note = chemically synthesized
  source 1..22: mol_type = other DNA
cttctattaagacagaggacta

SEQ ID NO: 63526 - DNA, 22 bp, synthetic construct
  misc_feature 1..22: note = chemically synthesized
  source 1..22: mol_type = other DNA
ctattaagacagaggactaaat

SEQ ID NO: 63527 - DNA, 22 bp, synthetic construct
  misc_feature 1..22: note = chemically synthesized
  source 1..22: mol_type = other DNA
tattaagacagaggactaaata

SEQ ID NO: 63528 - DNA, 22 bp, synthetic construct
  misc_feature 1..22: note = chemically synthesized
  source 1..22: mol_type = other DNA
ttaagacagaggactaaataaa

SEQ ID NO: 63529 - DNA, 22 bp, synthetic construct
  misc_feature 1..22: note = chemically synthesized
  source 1..22: mol_type = other DNA
agacagaggactaaataaaata

SEQ ID NO: 63530 - DNA, 22 bp, synthetic construct
  misc_feature 1..22: note = chemically synthesized
  source 1..22: mol_type = other DNA
aataaaataacctcttaaagcc

SEQ ID NO: 63531 - DNA, 22 bp, synthetic construct
  misc_feature 1..22: note = chemically synthesized
  source 1..22: mol_type = other DNA
ttaaagccactttaaactttcc

SEQ ID NO: 63532 - DNA, 22 bp, synthetic construct
  misc_feature 1..22: note = chemically synthesized
  source 1..22: mol_type = other DNA
aaagccactttaaactttccag

SEQ ID NO: 63533 - DNA, 22 bp, synthetic construct
  misc_feature 1..22: note = chemically synthesized
  source 1..22: mol_type = other DNA
aagccactttaaactttccagt

SEQ ID NO: 63534 - DNA, 22 bp, synthetic construct
  misc_feature 1..22: note = chemically synthesized
  source 1..22: mol_type = other DNA
taaactttccagtctgtgcctc

SEQ ID NO: 63535 - DNA, 22 bp, synthetic construct
  misc_feature 1..22: note = chemically synthesized
  source 1..22: mol_type = other DNA
aaactttccagtctgtgcctcc

SEQ ID NO: 63536 - DNA, 22 bp, synthetic construct
  misc_feature 1..22: note = chemically synthesized
  source 1..22: mol_type = other DNA
aactttccagtctgtgcctcca

SEQ ID NO: 63537 - DNA, 22 bp, synthetic construct
  misc_feature 1..22: note = chemically synthesized
  source 1..22: mol_type = other DNA
tccagtctgtgcctccattaat

SEQ ID NO: 63538 - DNA, 22 bp, synthetic construct
  misc_feature 1..22: note = chemically synthesized
  source 1..22: mol_type = other DNA
ccagtctgtgcctccattaatt

SEQ ID NO: 63539 - DNA, 22 bp, synthetic construct
  misc_feature 1..22: note = chemically synthesized
  source 1..22: mol_type = other DNA
cagtctgtgcctccattaattt

SEQ ID NO: 63540 - DNA, 22 bp, synthetic construct
  misc_feature 1..22: note = chemically synthesized
  source 1..22: mol_type = other DNA
tgcctccattaatttcagggag

SEQ ID NO: 63541 - DNA, 22 bp, synthetic construct
  misc_feature 1..22: note = chemically synthesized
  source 1..22: mol_type = other DNA
cattaatttcagggagaaattc

SEQ ID NO: 63542 - DNA, 22 bp, synthetic construct
  misc_feature 1..22: note = chemically synthesized
  source 1..22: mol_type = other DNA
atttcagggagaaattcatcct

SEQ ID NO: 63543 - DNA, 22 bp, synthetic construct
  misc_feature 1..22: note = chemically synthesized
  source 1..22: mol_type = other DNA
cagggagaaattcatccttgat

SEQ ID NO: 63544 - DNA, 22 bp, synthetic construct
  misc_feature 1..22: note = chemically synthesized
  source 1..22: mol_type = other DNA
agggagaaattcatccttgata

SEQ ID NO: 63545 - DNA, 22 bp, synthetic construct
  misc_feature 1..22: note = chemically synthesized
  source 1..22: mol_type = other DNA
atccttgataacaagctgttat

SEQ ID NO: 63546 - DNA, 22 bp, synthetic construct
  misc_feature 1..22: note = chemically synthesized
  source 1..22: mol_type = other DNA
gataacaagctgttatgatgaa

SEQ ID NO: 63547 - DNA, 22 bp, synthetic construct
  misc_feature 1..22: note = chemically synthesized
  source 1..22: mol_type = other DNA
ataacaagctgttatgatgaaa

SEQ ID NO: 63548 - DNA, 22 bp, synthetic construct
  misc_feature 1..22: note = chemically synthesized
  source 1..22: mol_type = other DNA
ttatgatgaaagcaaacatatt

SEQ ID NO: 63549 - DNA, 22 bp, synthetic construct
  misc_feature 1..22: note = chemically synthesized
  source 1..22: mol_type = other DNA
tgatgaaagcaaacatatttct

SEQ ID NO: 63550 - DNA, 22 bp, synthetic construct
  misc_feature 1..22: note = chemically synthesized
  source 1..22: mol_type = other DNA
ctacaaaagatgtttggtcctt

SEQ ID NO: 63551 - DNA, 22 bp, synthetic construct
  misc_feature 1..22: note = chemically synthesized
  source 1..22: mol_type = other DNA
tacaaaagatgtttggtccttc

SEQ ID NO: 63552 - DNA, 22 bp, synthetic construct
  misc_feature 1..22: note = chemically synthesized
  source 1..22: mol_type = other DNA
caaaagatgtttggtccttctt

SEQ ID NO: 63553 - DNA, 22 bp, synthetic construct
  misc_feature 1..22: note = chemically synthesized
  source 1..22: mol_type = other DNA
ggtccttctttccttctccttt

SEQ ID NO: 63554 - DNA, 22 bp, synthetic construct
  misc_feature 1..22: note = chemically synthesized
  source 1..22: mol_type = other DNA
gtccttctttccttctcctttc

SEQ ID NO: 63555 - DNA, 22 bp, synthetic construct
  misc_feature 1..22: note = chemically synthesized
  source 1..22: mol_type = other DNA
ctttccttctcctttccttttc

SEQ ID NO: 63556 - DNA, 22 bp, synthetic construct
  misc_feature 1..22: note = chemically synthesized
  source 1..22: mol_type = other DNA
tttccttctcctttccttttct

SEQ ID NO: 63557 - DNA, 22 bp, synthetic construct
  misc_feature 1..22: note = chemically synthesized
  source 1..22: mol_type = other DNA
tccttctcctttccttttcttc

SEQ ID NO: 63558 - DNA, 22 bp, synthetic construct
  misc_feature 1..22: note = chemically synthesized
  source 1..22: mol_type = other DNA
ccttctcctttccttttcttct

SEQ ID NO: 63559 - DNA, 22 bp, synthetic construct
  misc_feature 1..22: note = chemically synthesized
  source 1..22: mol_type = other DNA
cttctcctttccttttcttctt

SEQ ID NO: 63560 - DNA, 22 bp, synthetic construct
  misc_feature 1..22: note = chemically synthesized
  source 1..22: mol_type = other DNA
ctcctttccttttcttcttctt

SEQ ID NO: 63561 - DNA, 22 bp, synthetic construct
  misc_feature 1..22: note = chemically synthesized
  source 1..22: mol_type = other DNA
tcctttccttttcttcttcttc

SEQ ID NO: 63562 - DNA, 22 bp, synthetic construct
  misc_feature 1..22: note = chemically synthesized
  source 1..22: mol_type = other DNA
ctttccttttcttcttcttctt

SEQ ID NO: 63563 - DNA, 22 bp, synthetic construct
  misc_feature 1..22: note = chemically synthesized
  source 1..22: mol_type = other DNA
tccttttcttcttcttcttctt

SEQ ID NO: 63564 - DNA, 22 bp, synthetic construct
  misc_feature 1..22: note = chemically synthesized
  source 1..22: mol_type = other DNA
ccttttcttcttcttcttcttt

SEQ ID NO: 63565 - DNA, 22 bp, synthetic construct
  misc_feature 1..22: note = chemically synthesized
  source 1..22: mol_type = other DNA
cttttcttcttcttcttctttt

SEQ ID NO: 63566 - DNA, 22 bp, synthetic construct
  misc_feature 1..22: note = chemically synthesized
  source 1..22: mol_type = other DNA
ttcttcttcttcttcttttttt

SEQ ID NO: 63567 - DNA, 22 bp, synthetic construct
  misc_feature 1..22: note = chemically synthesized
  source 1..22: mol_type = other DNA
tcttcttcttcttctttttttt

SEQ ID NO: 63568 - DNA, 22 bp, synthetic construct
  misc_feature 1..22: note = chemically synthesized
  source 1..22: mol_type = other DNA
cttcttcttcttcttttttttt

SEQ ID NO: 63569 - DNA, 22 bp, synthetic construct
  misc_feature 1..22: note = chemically synthesized
  source 1..22: mol_type = other DNA
ttcttcttcttctttttttttt

SEQ ID NO: 63570 - DNA, 22 bp, synthetic construct
  misc_feature 1..22: note = chemically synthesized
  source 1..22: mol_type = other DNA
cttcttcttctttttttttttt

SEQ ID NO: 63571 - DNA, 22 bp, synthetic construct
  misc_feature 1..22: note = chemically synthesized
  source 1..22: mol_type = other DNA
ttcttcttcttttttttttttt

SEQ ID NO: 63572 - DNA, 22 bp, synthetic construct
  misc_feature 1..22: note = chemically synthesized
  source 1..22: mol_type = other DNA
cttcttcttttttttttttttt

SEQ ID NO: 63573 - DNA, 22 bp, synthetic construct
  misc_feature 1..22: note = chemically synthesized
  source 1..22: mol_type = other DNA
ttcttctttttttttttttttg

SEQ ID NO: 63574 - DNA, 22 bp, synthetic construct
  misc_feature 1..22: note = chemically synthesized
  source 1..22: mol_type = other DNA
cttctttttttttttttttgcc

SEQ ID NO: 63575 - DNA, 22 bp, synthetic construct
  misc_feature 1..22: note = chemically synthesized
  source 1..22: mol_type = other DNA
ttctttttttttttttttgcct

SEQ ID NO: 63576 - DNA, 22 bp, synthetic construct
  misc_feature 1..22: note = chemically synthesized
  source 1..22: mol_type = other DNA
ctttttttttttttttgcctat

SEQ ID NO: 63577 - DNA, 22 bp, synthetic construct
  misc_feature 1..22: note = chemically synthesized
  source 1..22: mol_type = other DNA
tttttttttttttttgcctata

SEQ ID NO: 63578 - DNA, 22 bp, synthetic construct
  misc_feature 1..22: note = chemically synthesized
  source 1..22: mol_type = other DNA
tttttttttttttgcctataaa

SEQ ID NO: 63579 - DNA, 22 bp, synthetic construct
  misc_feature 1..22: note = chemically synthesized
  source 1..22: mol_type = other DNA
ttttttttttttgcctataaac

SEQ ID NO: 63580 - DNA, 22 bp, synthetic construct
  misc_feature 1..22: note = chemically synthesized
  source 1..22: mol_type = other DNA
tttttttttttgcctataaaca

SEQ ID NO: 63581 - DNA, 22 bp, synthetic construct
  misc_feature 1..22: note = chemically synthesized
  source 1..22: mol_type = other DNA
ttttttttttgcctataaacaa

SEQ ID NO: 63582 - DNA, 22 bp, synthetic construct
  misc_feature 1..22: note = chemically synthesized
  source 1..22: mol_type = other DNA
tttttttttgcctataaacaat

SEQ ID NO: 63583 - DNA, 22 bp, synthetic construct
  misc_feature 1..22: note = chemically synthesized
  source 1..22: mol_type = other DNA
ttttttttgcctataaacaatc

SEQ ID NO: 63584 - DNA, 22 bp, synthetic construct
  misc_feature 1..22: note = chemically synthesized
  source 1..22: mol_type = other DNA
tttttttgcctataaacaatca

SEQ ID NO: 63585 - DNA, 22 bp, synthetic construct
  misc_feature 1..22: note = chemically synthesized
  source 1..22: mol_type = other DNA
ttttttgcctataaacaatcat

SEQ ID NO: 63586 - DNA, 22 bp, synthetic construct
  misc_feature 1..22: note = chemically synthesized
  source 1..22: mol_type = other DNA
tttttgcctataaacaatcatt

SEQ ID NO: 63587 - DNA, 22 bp, synthetic construct
  misc_feature 1..22: note = chemically synthesized
  source 1..22: mol_type = other DNA
ttttgcctataaacaatcattt

SEQ ID NO: 63588 - DNA, 22 bp, synthetic construct
  misc_feature 1..22: note = chemically synthesized
  source 1..22: mol_type = other DNA
tttgcctataaacaatcatttt

SEQ ID NO: 63589 - DNA, 22 bp, synthetic construct
  misc_feature 1..22: note = chemically synthesized
  source 1..22: mol_type = other DNA
ttgcctataaacaatcattttc

SEQ ID NO: 63590 - DNA, 22 bp, synthetic construct
  misc_feature 1..22: note = chemically synthesized
  source 1..22: mol_type = other DNA
tgcctataaacaatcattttct

SEQ ID NO: 63591 - DNA, 22 bp, synthetic construct
  misc_feature 1..22: note = chemically synthesized
  source 1..22: mol_type = other DNA
gcctataaacaatcattttcta

SEQ ID NO: 63592 - DNA, 22 bp, synthetic construct
  misc_feature 1..22: note = chemically synthesized
  source 1..22: mol_type = other DNA
cctataaacaatcattttctag

SEQ ID NO: 63593 - DNA, 22 bp, synthetic construct
  misc_feature 1..22: note = chemically synthesized
  source 1..22: mol_type = other DNA
taaacaatcattttctagtatt

SEQ ID NO: 63594 - DNA, 22 bp, synthetic construct
  misc_feature 1..22: note = chemically synthesized
  source 1..22: mol_type = other DNA
tctagtattatatgtgtgtgtg

SEQ ID NO: 63595 - DNA, 22 bp, synthetic construct
  misc_feature 1..22: note = chemically synthesized
  source 1..22: mol_type = other DNA
ctagtattatatgtgtgtgtgt

SEQ ID NO: 63596 - DNA, 22 bp, synthetic construct
  misc_feature 1..22: note = chemically synthesized
  source 1..22: mol_type = other DNA
tagtattatatgtgtgtgtgtg

SEQ ID NO: 63597 - DNA, 22 bp, synthetic construct
  misc_feature 1..22: note = chemically synthesized
  source 1..22: mol_type = other DNA
gtattatatgtgtgtgtgtgtg

SEQ ID NO: 63598 - DNA, 22 bp, synthetic construct
  misc_feature 1..22: note = chemically synthesized
  source 1..22: mol_type = other DNA
tatgtgtgtgtgtgtgtgtgtg

SEQ ID NO: 63599 - DNA, 22 bp, synthetic construct
  misc_feature 1..22: note = chemically synthesized
  source 1..22: mol_type = other DNA
ttttttttttttcagatggtgt

SEQ ID NO: 63600 - DNA, 22 bp, synthetic construct
  misc_feature 1..22: note = chemically synthesized
  source 1..22: mol_type = other DNA
tttttttttttcagatggtgtc

SEQ ID NO: 63601 - DNA, 22 bp, synthetic construct
  misc_feature 1..22: note = chemically synthesized
  source 1..22: mol_type = other DNA
ttttttttttcagatggtgtct

SEQ ID NO: 63602 - DNA, 22 bp, synthetic construct
  misc_feature 1..22: note = chemically synthesized
  source 1..22: mol_type = other DNA
tttttttttcagatggtgtctc

SEQ ID NO: 63603 - DNA, 22 bp, synthetic construct
  misc_feature 1..22: note = chemically synthesized
  source 1..22: mol_type = other DNA
ttttttttcagatggtgtctca

SEQ ID NO: 63604 - DNA, 22 bp, synthetic construct
  misc_feature 1..22: note = chemically synthesized
  source 1..22: mol_type = other DNA
tttttttcagatggtgtctcat

SEQ ID NO: 63605 - DNA, 22 bp, synthetic construct
  misc_feature 1..22: note = chemically synthesized
  source 1..22: mol_type = other DNA
ttttttcagatggtgtctcatt

SEQ ID NO: 63606 - DNA, 22 bp, synthetic construct
  misc_feature 1..22: note = chemically synthesized
  source 1..22: mol_type = other DNA
tttttcagatggtgtctcattt

SEQ ID NO: 63607 - DNA, 22 bp, synthetic construct
  misc_feature 1..22: note = chemically synthesized
  source 1..22: mol_type = other DNA
ttttcagatggtgtctcatttt

SEQ ID NO: 63608 - DNA, 22 bp, synthetic construct
  misc_feature 1..22: note = chemically synthesized
  source 1..22: mol_type = other DNA
tttcagatggtgtctcattttg

SEQ ID NO: 63609 - DNA, 22 bp, synthetic construct
  misc_feature 1..22: note = chemically synthesized
  source 1..22: mol_type = other DNA
ttcagatggtgtctcattttgt

SEQ ID NO: 63610 - DNA, 22 bp, synthetic construct
  misc_feature 1..22: note = chemically synthesized
  source 1..22: mol_type = other DNA
tcagatggtgtctcattttgtc

SEQ ID NO: 63611 - DNA, 22 bp, synthetic construct
  misc_feature 1..22: note = chemically synthesized
  source 1..22: mol_type = other DNA
cagatggtgtctcattttgtcg

SEQ ID NO: 63612 - DNA, 22 bp, synthetic construct
  misc_feature 1..22: note = chemically synthesized
  source 1..22: mol_type = other DNA
agatggtgtctcattttgtcgc

SEQ ID NO: 63613 - DNA, 22 bp, synthetic construct
  misc_feature 1..22: note = chemically synthesized
  source 1..22: mol_type = other DNA
attttgtcgcccaggctggagt

SEQ ID NO: 63614 - DNA, 22 bp, synthetic construct
  misc_feature 1..22: note = chemically synthesized
  source 1..22: mol_type = other DNA
tgtcgcccaggctggagtgcaa

SEQ ID NO: 63615 - DNA, 22 bp, synthetic construct
  misc_feature 1..22: note = chemically synthesized
  source 1..22: mol_type = other DNA
gtcgcccaggctggagtgcaat

SEQ ID NO: 63616 - DNA, 22 bp, synthetic construct
  misc_feature 1..22: note = chemically synthesized
  source 1..22: mol_type = other DNA
tcgcccaggctggagtgcaatg

SEQ ID NO: 63617 - DNA, 22 bp, synthetic construct
  misc_feature 1..22: note = chemically synthesized
  source 1..22: mol_type = other DNA
gagtgcaatggcgcaatcttgg

SEQ ID NO: 63618 - DNA, 22 bp, synthetic construct
  misc_feature 1..22: note = chemically synthesized
  source 1..22: mol_type = other DNA
ggctcaccacctcccaggttca

SEQ ID NO: 63619 - DNA, 22 bp, synthetic construct
  misc_feature 1..22: note = chemically synthesized
  source 1..22: mol_type = other DNA
gctcaccacctcccaggttcaa

SEQ ID NO: 63620 - DNA, 22 bp, synthetic construct
  misc_feature 1..22: note = chemically synthesized
  source 1..22: mol_type = other DNA
accacctcccaggttcaagcga

SEQ ID NO: 63621 - DNA, 22 bp, synthetic construct
  misc_feature 1..22: note = chemically synthesized
  source 1..22: mol_type = other DNA
ccaggttcaagcgattctcctg

SEQ ID NO: 63622 - DNA, 22 bp, synthetic construct
  misc_feature 1..22: note = chemically synthesized
  source 1..22: mol_type = other DNA
aagcgattctcctgccttagcc

SEQ ID NO: 63623 - DNA, 22 bp, synthetic construct
  misc_feature 1..22: note = chemically synthesized
  source 1..22: mol_type = other DNA
tcctgccttagcctcctgagta

SEQ ID NO: 63624 - DNA, 22 bp, synthetic construct
  misc_feature 1..22: note = chemically synthesized
  source 1..22: mol_type = other DNA
ctgccttagcctcctgagtagc

SEQ ID NO: 63625 - DNA, 22 bp, synthetic construct
  misc_feature 1..22: note = chemically synthesized
  source 1..22: mol_type = other DNA
ccttagcctcctgagtagctca

SEQ ID NO: 63626 - DNA, 22 bp, synthetic construct
  misc_feature 1..22: note = chemically synthesized
  source 1..22: mol_type = other DNA
agcctcctgagtagctcagatt

SEQ ID NO: 63627 - DNA, 22 bp, synthetic construct
  misc_feature 1..22: note = chemically synthesized
  source 1..22: mol_type = other DNA
gcctcctgagtagctcagatta

SEQ ID NO: 63628 - DNA, 22 bp, synthetic construct
  misc_feature 1..22: note = chemically synthesized
  source 1..22: mol_type = other DNA
ctgagtagctcagattacaggc

SEQ ID NO: 63629 - DNA, 22 bp, synthetic construct
  misc_feature 1..22: note = chemically synthesized
  source 1..22: mol_type = other DNA
agtagctcagattacaggcatg

SEQ ID NO: 63630 - DNA, 22 bp, synthetic construct
  misc_feature 1..22: note = chemically synthesized
  source 1..22: mol_type = other DNA
agattacaggcatgcaccagga

SEQ ID NO: 63631 - DNA, 22 bp, synthetic construct
  misc_feature 1..22: note = chemically synthesized
  source 1..22: mol_type = other DNA
caggcatgcaccaggacaccca

SEQ ID NO: 63632 - DNA, 22 bp, synthetic construct
  misc_feature 1..22: note = chemically synthesized
  source 1..22: mol_type = other DNA
atttttgtatttttagtagaga

SEQ ID NO: 63633 - DNA, 22 bp, synthetic construct
  misc_feature 1..22: note = chemically synthesized
  source 1..22: mol_type = other DNA
ttgtatttttagtagagacagg

SEQ ID NO: 63634 - DNA, 22 bp, synthetic construct
  misc_feature 1..22: note = chemically synthesized
  source 1..22: mol_type = other DNA
tgtatttttagtagagacaggg

SEQ ID NO: 63635 - DNA, 22 bp, synthetic construct
  misc_feature 1..22: note = chemically synthesized
  source 1..22: mol_type = other DNA
gtatttttagtagagacagggt

SEQ ID NO: 63636 - DNA, 22 bp, synthetic construct
  misc_feature 1..22: note = chemically synthesized
  source 1..22: mol_type = other DNA
tatttttagtagagacagggtt

SEQ ID NO: 63637 - DNA, 22 bp, synthetic construct
  misc_feature 1..22: note = chemically synthesized
  source 1..22: mol_type = other DNA
ttagtagagacagggttttgcc

SEQ ID NO: 63638 - DNA, 22 bp, synthetic construct
  misc_feature 1..22: note = chemically synthesized
  source 1..22: mol_type = other DNA
tagtagagacagggttttgcca

SEQ ID NO: 63639 - DNA, 22 bp, synthetic construct
  misc_feature 1..22: note = chemically synthesized
  source 1..22: mol_type = other DNA
agtagagacagggttttgccat

SEQ ID NO: 63640 - DNA, 22 bp, synthetic construct
  misc_feature 1..22: note = chemically synthesized
  source 1..22: mol_type = other DNA
gtagagacagggttttgccatg

SEQ ID NO: 63641 - DNA, 22 bp, synthetic construct
  misc_feature 1..22: note = chemically synthesized
  source 1..22: mol_type = other DNA
tgccatgttggccaggctggtc

SEQ ID NO: 63642 - DNA, 22 bp, synthetic construct
  misc_feature 1..22: note = chemically synthesized
  source 1..22: mol_type = other DNA
gccatgttggccaggctggtct

SEQ ID NO: 63643 - DNA, 22 bp, synthetic construct
  misc_feature 1..22: note = chemically synthesized
  source 1..22: mol_type = other DNA
ccatgttggccaggctggtctt

SEQ ID NO: 63644 - DNA, 22 bp, synthetic construct
  misc_feature 1..22: note = chemically synthesized
  source 1..22: mol_type = other DNA
gccaggctggtcttgaactcct

SEQ ID NO: 63645 - DNA, 22 bp, synthetic construct
  misc_feature 1..22: note = chemically synthesized
  source 1..22: mol_type = other DNA
gtcttgaactcctcacctcagg

SEQ ID NO: 63646 - DNA, 22 bp, synthetic construct
  misc_feature 1..22: note = chemically synthesized
  source 1..22: mol_type = other DNA
gaactcctcacctcaggtgatc

SEQ ID NO: 63647 - DNA, 22 bp, synthetic construct
  misc_feature 1..22: note = chemically synthesized
  source 1..22: mol_type = other DNA
aactcctcacctcaggtgatcc

SEQ ID NO: 63648 - DNA, 22 bp, synthetic construct
  misc_feature 1..22: note = chemically synthesized
  source 1..22: mol_type = other DNA
ctcacctcaggtgatccacccg

SEQ ID NO: 63649 - DNA, 22 bp, synthetic construct
  misc_feature 1..22: note = chemically synthesized
  source 1..22: mol_type = other DNA
acctcaggtgatccacccgcct

SEQ ID NO: 63650 - DNA, 22 bp, synthetic construct
  misc_feature 1..22: note = chemically synthesized
  source 1..22: mol_type = other DNA
aggtgatccacccgcctcagcc

SEQ ID NO: 63651 - DNA, 22 bp, synthetic construct
  misc_feature 1..22: note = chemically synthesized
  source 1..22: mol_type = other DNA
agcctcccaaagtgctgggatt

SEQ ID NO: 63652 - DNA, 22 bp, synthetic construct
  misc_feature 1..22: note = chemically synthesized
  source 1..22: mol_type = other DNA
ccaaagtgctgggattacaggg

SEQ ID NO: 63653 - DNA, 22 bp, synthetic construct
  misc_feature 1..22: note = chemically synthesized
  source 1..22: mol_type = other DNA
ggattacagggtgagccaccgt

SEQ ID NO: 63654 - DNA, 22 bp, synthetic construct
  misc_feature 1..22: note = chemically synthesized
  source 1..22: mol_type = other DNA
cagggtgagccaccgtgcctgg

SEQ ID NO: 63655 - DNA, 22 bp, synthetic construct
  misc_feature 1..22: note = chemically synthesized
  source 1..22: mol_type = other DNA
gcctatcctacatattaatagt

SEQ ID NO: 63656 - DNA, 22 bp, synthetic construct
  misc_feature 1..22: note = chemically synthesized
  source 1..22: mol_type = other DNA
tcctacatattaatagtttact

SEQ ID NO: 63657 - DNA, 22 bp, synthetic construct
  misc_feature 1..22: note = chemically synthesized
  source 1..22: mol_type = other DNA
catattaatagtttactttttt

SEQ ID NO: 63658 - DNA, 22 bp, synthetic construct
  misc_feature 1..22: note = chemically synthesized
  source 1..22: mol_type = other DNA
atagtttactttttttttgaga

SEQ ID NO: 63659 - DNA, 22 bp, synthetic construct
  misc_feature 1..22: note = chemically synthesized
  source 1..22: mol_type = other DNA
actttttttttgagacagagtc

SEQ ID NO: 63660 - DNA, 22 bp, synthetic construct
  misc_feature 1..22: note = chemically synthesized
  source 1..22: mol_type = other DNA
ctttttttttgagacagagtct

SEQ ID NO: 63661 - DNA, 22 bp, synthetic construct
  misc_feature 1..22: note = chemically synthesized
  source 1..22: mol_type = other DNA
tttttttgagacagagtctcgt

SEQ ID NO: 63662 - DNA, 22 bp, synthetic construct
  misc_feature 1..22: note = chemically synthesized
  source 1..22: mol_type = other DNA
ttttttgagacagagtctcgtt

SEQ ID NO: 63663 - DNA, 22 bp, synthetic construct
  misc_feature 1..22: note = chemically synthesized
  source 1..22: mol_type = other DNA
tttttgagacagagtctcgttc

SEQ ID NO: 63664 - DNA, 22 bp, synthetic construct
  misc_feature 1..22: note = chemically synthesized
  source 1..22: mol_type = other DNA
ttttgagacagagtctcgttct

SEQ ID NO: 63665 - DNA, 22 bp, synthetic construct
  misc_feature 1..22: note = chemically synthesized
  source 1..22: mol_type = other DNA
tttgagacagagtctcgttctg

SEQ ID NO: 63666 - DNA, 22 bp, synthetic construct
  misc_feature 1..22: note = chemically synthesized
  source 1..22: mol_type = other DNA
ttgagacagagtctcgttctgt

SEQ ID NO: 63667 - DNA, 22 bp, synthetic construct
  misc_feature 1..22: note = chemically synthesized
  source 1..22: mol_type = other DNA
tgagacagagtctcgttctgtc

SEQ ID NO: 63668 - DNA, 22 bp, synthetic construct
  misc_feature 1..22: note = chemically synthesized
  source 1..22: mol_type = other DNA
gagacagagtctcgttctgtca

SEQ ID NO: 63669 - DNA, 22 bp, synthetic construct
  misc_feature 1..22: note = chemically synthesized
  source 1..22: mol_type = other DNA
agacagagtctcgttctgtcat

SEQ ID NO: 63670 - DNA, 22 bp, synthetic construct
  misc_feature 1..22: note = chemically synthesized
  source 1..22: mol_type = other DNA
gttctgtcattcaggctggagt

SEQ ID NO: 63671 - DNA, 22 bp, synthetic construct
  misc_feature 1..22: note = chemically synthesized
  source 1..22: mol_type = other DNA
tgtcattcaggctggagtgcag

SEQ ID NO: 63672 - DNA, 22 bp, synthetic construct
  misc_feature 1..22: note = chemically synthesized
  source 1..22: mol_type = other DNA
tcattcaggctggagtgcagtg

SEQ ID NO: 63673 - DNA, 22 bp, synthetic construct
  misc_feature 1..22: note = chemically synthesized
  source 1..22: mol_type = other DNA
aggctggagtgcagtggtccga

SEQ ID NO: 63674 - DNA, 22 bp, synthetic construct
  misc_feature 1..22: note = chemically synthesized
  source 1..22: mol_type = other DNA
gagtgcagtggtccgatctcgg

SEQ ID NO: 63675 - DNA, 22 bp, synthetic construct
  misc_feature 1..22: note = chemically synthesized
  source 1..22: mol_type = other DNA
ggttcactgcaacctctgcctc

SEQ ID NO: 63676 - DNA, 22 bp, synthetic construct
  misc_feature 1..22: note = chemically synthesized
  source 1..22: mol_type = other DNA
actgcaacctctgcctcccagg

SEQ ID NO: 63677 - DNA, 22 bp, synthetic construct
  misc_feature 1..22: note = chemically synthesized
  source 1..22: mol_type = other DNA
caacctctgcctcccaggttca

SEQ ID NO: 63678 - DNA, 22 bp, synthetic construct
  misc_feature 1..22: note = chemically synthesized
  source 1..22: mol_type = other DNA
tgcctcccaggttcaagcgatt

SEQ ID NO: 63679 - DNA, 22 bp, synthetic construct
  misc_feature 1..22: note = chemically synthesized
  source 1..22: mol_type = other DNA
cctcccaggttcaagcgattct

SEQ ID NO: 63680 - DNA, 22 bp, synthetic construct
  misc_feature 1..22: note = chemically synthesized
  source 1..22: mol_type = other DNA
ccaggttcaagcgattctcctg

SEQ ID NO: 63681 - DNA, 22 bp, synthetic construct
  misc_feature 1..22: note = chemically synthesized
  source 1..22: mol_type = other DNA
aagcgattctcctgcctcagcc

SEQ ID NO: 63682 - DNA, 22 bp, synthetic construct
  misc_feature 1..22: note = chemically synthesized
  source 1..22: mol_type = other DNA
tcctgcctcagcctcccaggta

SEQ ID NO: 63683 - DNA, 22 bp, synthetic construct
  misc_feature 1..22: note = chemically synthesized
  source 1..22: mol_type = other DNA
ctgcctcagcctcccaggtagc

SEQ ID NO: 63684 - DNA, 22 bp, synthetic construct
  misc_feature 1..22: note = chemically synthesized
  source 1..22: mol_type = other DNA
cctcagcctcccaggtagctga

SEQ ID NO: 63685 - DNA, 22 bp, synthetic construct
  misc_feature 1..22: note = chemically synthesized
  source 1..22: mol_type = other DNA
agcctcccaggtagctgagact

SEQ ID NO: 63686 - DNA, 22 bp, synthetic construct
  misc_feature 1..22: note = chemically synthesized
  source 1..22: mol_type = other DNA
ccaggtagctgagactacaggc

SEQ ID NO: 63687 - DNA, 22 bp, synthetic construct
  misc_feature 1..22: note = chemically synthesized
  source 1..22: mol_type = other DNA
agactacaggcgtgtgccatca

SEQ ID NO: 63688 - DNA, 22 bp, synthetic construct
  misc_feature 1..22: note = chemically synthesized
  source 1..22: mol_type = other DNA
caggcgtgtgccatcacgcctg

SEQ ID NO: 63689 - DNA, 22 bp, synthetic construct
  misc_feature 1..22: note = chemically synthesized
  source 1..22: mol_type = other DNA
accaatttttccatttttagta

SEQ ID NO: 63690 - DNA, 22 bp, synthetic construct
  misc_feature 1..22: note = chemically synthesized
  source 1..22: mol_type = other DNA
ttccatttttagtaaagacagg

SEQ ID NO: 63691 - DNA, 22 bp, synthetic construct
  misc_feature 1..22: note = chemically synthesized
  source 1..22: mol_type = other DNA
tccatttttagtaaagacagga

SEQ ID NO: 63692 - DNA, 22 bp, synthetic construct
  misc_feature 1..22: note = chemically synthesized
  source 1..22: mol_type = other DNA
ccatttttagtaaagacaggat

SEQ ID NO: 63693 - DNA, 22 bp, synthetic construct
  misc_feature 1..22: note = chemically synthesized
  source 1..22: mol_type = other DNA
catttttagtaaagacaggatt

SEQ ID NO: 63694 - DNA, 22 bp, synthetic construct
  misc_feature 1..22: note = chemically synthesized
  source 1..22: mol_type = other DNA
ttagtaaagacaggattttgca

SEQ ID NO: 63695 - DNA, 22 bp, synthetic construct
  misc_feature 1..22: note = chemically synthesized
  source 1..22: mol_type = other DNA
tagtaaagacaggattttgcaa

SEQ ID NO: 63696 - DNA, 22 bp, synthetic construct
  misc_feature 1..22: note = chemically synthesized
  source 1..22: mol_type = other DNA
agtaaagacaggattttgcaat

SEQ ID NO: 63697 - DNA, 22 bp, synthetic construct
  misc_feature 1..22: note = chemically synthesized
  source 1..22: mol_type = other DNA
gtaaagacaggattttgcaatg

SEQ ID NO: 63698 - DNA, 22 bp, synthetic construct
  misc_feature 1..22: note = chemically synthesized
  source 1..22: mol_type = other DNA
tgcaatgttggccaggctggtt

SEQ ID NO: 63699 - DNA, 22 bp, synthetic construct
  misc_feature 1..22: note = chemically synthesized
  source 1..22: mol_type = other DNA
gcaatgttggccaggctggttt

SEQ ID NO: 63700 - DNA, 22 bp, synthetic construct
  misc_feature 1..22: note = chemically synthesized
  source 1..22: mol_type = other DNA
caatgttggccaggctggtttt

SEQ ID NO: 63701 - DNA, 22 bp, synthetic construct
  misc_feature 1..22: note = chemically synthesized
  source 1..22: mol_type = other DNA
gccaggctggttttgaactcct

SEQ ID NO: 63702 - DNA, 22 bp, synthetic construct
  misc_feature 1..22: note = chemically synthesized
  source 1..22: mol_type = other DNA
gttttgaactcctgacctcagg

SEQ ID NO: 63703 - DNA, 22 bp, synthetic construct
  misc_feature 1..22: note = chemically synthesized
  source 1..22: mol_type = other DNA
tgaactcctgacctcaggtgat

SEQ ID NO: 63704 - DNA, 22 bp, synthetic construct
  misc_feature 1..22: note = chemically synthesized
  source 1..22: mol_type = other DNA
gaactcctgacctcaggtgatc

SEQ ID NO: 63705 - DNA, 22 bp, synthetic construct
  misc_feature 1..22: note = chemically synthesized
  source 1..22: mol_type = other DNA
aactcctgacctcaggtgatct

SEQ ID NO: 63706 - DNA, 22 bp, synthetic construct
  misc_feature 1..22: note = chemically synthesized
  source 1..22: mol_type = other DNA
ctgacctcaggtgatctaccta

SEQ ID NO: 63707 - DNA, 22 bp, synthetic construct
  misc_feature 1..22: note = chemically synthesized
  source 1..22: mol_type = other DNA
acctcaggtgatctacctacct

SEQ ID NO: 63708 - DNA, 22 bp, synthetic construct
  misc_feature 1..22: note = chemically synthesized
  source 1..22: mol_type = other DNA
aggtgatctacctaccttggct

SEQ ID NO: 63709 - DNA, 22 bp, synthetic construct
  misc_feature 1..22: note = chemically synthesized
  source 1..22: mol_type = other DNA
cctaccttggcttcccaaagtg

SEQ ID NO: 63710 - DNA, 22 bp, synthetic construct
  misc_feature 1..22: note = chemically synthesized
  source 1..22: mol_type = other DNA
ccttggcttcccaaagtgctgg

SEQ ID NO: 63711 - DNA, 22 bp, synthetic construct
  misc_feature 1..22: note = chemically synthesized
  source 1..22: mol_type = other DNA
ggcttcccaaagtgctgggatt

SEQ ID NO: 63712 - DNA, 22 bp, synthetic construct
  misc_feature 1..22: note = chemically synthesized
  source 1..22: mol_type = other DNA
gcttcccaaagtgctgggatta

SEQ ID NO: 63713 - DNA, 22 bp, synthetic construct
  misc_feature 1..22: note = chemically synthesized
  source 1..22: mol_type = other DNA
cccaaagtgctgggattacagg

SEQ ID NO: 63714 - DNA, 22 bp, synthetic construct
  misc_feature 1..22: note = chemically synthesized
  source 1..22: mol_type = other DNA
ccaaagtgctgggattacaggc

SEQ ID NO: 63715 - DNA, 22 bp, synthetic construct
  misc_feature 1..22: note = chemically synthesized
  source 1..22: mol_type = other DNA
ggattacaggcatgagcaacca

SEQ ID NO: 63716 - DNA, 22 bp, synthetic construct
  misc_feature 1..22: note = chemically synthesized
  source 1..22: mol_type = other DNA
caggcatgagcaaccacaactg

SEQ ID NO: 63717 - DNA, 22 bp, synthetic construct
  misc_feature 1..22: note = chemically synthesized
  source 1..22: mol_type = other DNA
gcctagtttacttatttattat

SEQ ID NO: 63718 - DNA, 22 bp, synthetic construct
  misc_feature 1..22: note = chemically synthesized
  source 1..22: mol_type = other DNA
gtttacttatttattataattt

SEQ ID NO: 63719 - DNA, 22 bp, synthetic construct
  misc_feature 1..22: note = chemically synthesized
  source 1..22: mol_type = other DNA
acttatttattataatttttgt

SEQ ID NO: 63720 - DNA, 22 bp, synthetic construct
  misc_feature 1..22: note = chemically synthesized
  source 1..22: mol_type = other DNA
cttatttattataatttttgta

SEQ ID NO: 63721 - DNA, 22 bp, synthetic construct
  misc_feature 1..22: note = chemically synthesized
  source 1..22: mol_type = other DNA
atttattataatttttgtatat

SEQ ID NO: 63722 - DNA, 22 bp, synthetic construct
  misc_feature 1..22: note = chemically synthesized
  source 1..22: mol_type = other DNA
tttattataatttttgtatatt

SEQ ID NO: 63723 - DNA, 22 bp, synthetic construct
  misc_feature 1..22: note = chemically synthesized
  source 1..22: mol_type = other DNA
attataatttttgtatatttca

SEQ ID NO: 63724 - DNA, 22 bp, synthetic construct
  misc_feature 1..22: note = chemically synthesized
  source 1..22: mol_type = other DNA
ttataatttttgtatatttcac

SEQ ID NO: 63725 - DNA, 22 bp, synthetic construct
  misc_feature 1..22: note = chemically synthesized
  source 1..22: mol_type = other DNA
taatttttgtatatttcacctc

SEQ ID NO: 63726 - DNA, 22 bp, synthetic construct
  misc_feature 1..22: note = chemically synthesized
  source 1..22: mol_type = other DNA
ttgtatatttcacctcctctat

SEQ ID NO: 63727 - DNA, 22 bp, synthetic construct
  misc_feature 1..22: note = chemically synthesized
  source 1..22: mol_type = other DNA
tgtatatttcacctcctctatt

SEQ ID NO: 63728 - DNA, 22 bp, synthetic construct
  misc_feature 1..22: note = chemically synthesized
  source 1..22: mol_type = other DNA
gtatatttcacctcctctattc

SEQ ID NO: 63729 - DNA, 22 bp, synthetic construct
  misc_feature 1..22: note = chemically synthesized
  source 1..22: mol_type = other DNA
tatatttcacctcctctattca

SEQ ID NO: 63730 - DNA, 22 bp, synthetic construct
  misc_feature 1..22: note = chemically synthesized
  source 1..22: mol_type = other DNA
cacctcctctattcagatttca

SEQ ID NO: 63731 - DNA, 22 bp, synthetic construct
  misc_feature 1..22: note = chemically synthesized
  source 1..22: mol_type = other DNA
acctcctctattcagatttcag

SEQ ID NO: 63732 - DNA, 22 bp, synthetic construct
  misc_feature 1..22: note = chemically synthesized
  source 1..22: mol_type = other DNA
ctctattcagatttcagctcca

SEQ ID NO: 63733 - DNA, 22 bp, synthetic construct
  misc_feature 1..22: note = chemically synthesized
  source 1..22: mol_type = other DNA
tattcagatttcagctccacaa

SEQ ID NO: 63734 - DNA, 22 bp, synthetic construct
  misc_feature 1..22: note = chemically synthesized
  source 1..22: mol_type = other DNA
ttcagatttcagctccacaagg

SEQ ID NO: 63735 - DNA, 22 bp, synthetic construct
  misc_feature 1..22: note = chemically synthesized
  source 1..22: mol_type = other DNA
agatttcagctccacaagggca

SEQ ID NO: 63736 - DNA, 22 bp, synthetic construct
  misc_feature 1..22: note = chemically synthesized
  source 1..22: mol_type = other DNA
cagctccacaagggcagggatc

SEQ ID NO: 63737 - DNA, 22 bp, synthetic construct
  misc_feature 1..22: note = chemically synthesized
  source 1..22: mol_type = other DNA
agctccacaagggcagggatct

SEQ ID NO: 63738 - DNA, 22 bp, synthetic construct
  misc_feature 1..22: note = chemically synthesized
  source 1..22: mol_type = other DNA
cacaagggcagggatctttgtg

SEQ ID NO: 63739 - DNA, 22 bp, synthetic construct
  misc_feature 1..22: note = chemically synthesized
  source 1..22: mol_type = other DNA
tgtgtctgtgttgttcactgac

SEQ ID NO: 63740 - DNA, 22 bp, synthetic construct
  misc_feature 1..22: note = chemically synthesized
  source 1..22: mol_type = other DNA
gtgtctgtgttgttcactgaca

SEQ ID NO: 63741 - DNA, 22 bp, synthetic construct
  misc_feature 1..22: note = chemically synthesized
  source 1..22: mol_type = other DNA
tgtctgtgttgttcactgacag

SEQ ID NO: 63742 - DNA, 22 bp, synthetic construct
  misc_feature 1..22: note = chemically synthesized
  source 1..22: mol_type = other DNA
tgttgttcactgacagaggtat

SEQ ID NO: 63743 - DNA, 22 bp, synthetic construct
  misc_feature 1..22: note = chemically synthesized
  source 1..22: mol_type = other DNA
ttcactgacagaggtatcccta

SEQ ID NO: 63744 - DNA, 22 bp, synthetic construct
  misc_feature 1..22: note = chemically synthesized
  source 1..22: mol_type = other DNA
actgacagaggtatccctagca

SEQ ID NO: 63745 - DNA, 22 bp, synthetic construct
  misc_feature 1..22: note = chemically synthesized
  source 1..22: mol_type = other DNA
acagaggtatccctagcacata

SEQ ID NO: 63746 - DNA, 22 bp, synthetic construct
  misc_feature 1..22: note = chemically synthesized
  source 1..22: mol_type = other DNA
gcacatagaacagtgtatagct

SEQ ID NO: 63747 - DNA, 22 bp, synthetic construct
  misc_feature 1..22: note = chemically synthesized
  source 1..22: mol_type = other DNA
ccagtaggtgcttggtaagtaa

SEQ ID NO: 63748 - DNA, 22 bp, synthetic construct
  misc_feature 1..22: note = chemically synthesized
  source 1..22: mol_type = other DNA
ggtaagtaacagctgaatgagt

SEQ ID NO: 63749 - DNA, 22 bp, synthetic construct
  misc_feature 1..22: note = chemically synthesized
  source 1..22: mol_type = other DNA
gtaagtaacagctgaatgagtg

SEQ ID NO: 63750 - DNA, 22 bp, synthetic construct
  misc_feature 1..22: note = chemically synthesized
  source 1..22: mol_type = other DNA
aatgagtgaatatgctctgagg

SEQ ID NO: 63751 - DNA, 22 bp, synthetic construct
  misc_feature 1..22: note = chemically synthesized
  source 1..22: mol_type = other DNA
tgaggtaaatgcgtggtctgtg

SEQ ID NO: 63752 - DNA, 22 bp, synthetic construct
  misc_feature 1..22: note = chemically synthesized
  source 1..22: mol_type = other DNA
aggtaaatgcgtggtctgtgag

SEQ ID NO: 63753 - DNA, 22 bp, synthetic construct
  misc_feature 1..22: note = chemically synthesized
  source 1..22: mol_type = other DNA
tgagagcaaataactaagggac

SEQ ID NO: 63754 - DNA, 22 bp, synthetic construct
  misc_feature 1..22: note = chemically synthesized
  source 1..22: mol_type = other DNA
agggaccttccctagttttggg

SEQ ID NO: 63755 - DNA, 22 bp, synthetic construct
  misc_feature 1..22: note = chemically synthesized
  source 1..22: mol_type = other DNA
ccctagttttggggtcagggaa

SEQ ID NO: 63756 - DNA, 22 bp, synthetic construct
  misc_feature 1..22: note = chemically synthesized
  source 1..22: mol_type = other DNA
cctagttttggggtcagggaaa

SEQ ID NO: 63757 - DNA, 22 bp, synthetic construct
  misc_feature 1..22: note = chemically synthesized
  source 1..22: mol_type = other DNA
gttttggggtcagggaaagggt

SEQ ID NO: 63758 - DNA, 22 bp, synthetic construct
  misc_feature 1..22: note = chemically synthesized
  source 1..22: mol_type = other DNA
tggggtcagggaaagggtctct

SEQ ID NO: 63759 - DNA, 22 bp, synthetic construct
  misc_feature 1..22: note = chemically synthesized
  source 1..22: mol_type = other DNA
ggggtcagggaaagggtctctg

SEQ ID NO: 63760 - DNA, 22 bp, synthetic construct
  misc_feature 1..22: note = chemically synthesized
  source 1..22: mol_type = other DNA
gggtcagggaaagggtctctga

SEQ ID NO: 63761 - DNA, 22 bp, synthetic construct
  misc_feature 1..22: note = chemically synthesized
  source 1..22: mol_type = other DNA
tgaggaagggatactagtacct

SEQ ID NO: 63762 - DNA, 22 bp, synthetic construct
  misc_feature 1..22: note = chemically synthesized
  source 1..22: mol_type = other DNA
aggaagggatactagtacctta

SEQ ID NO: 63763 - DNA, 22 bp, synthetic construct
  misc_feature 1..22: note = chemically synthesized
  source 1..22: mol_type = other DNA
gtaccttagagagtactagtct

SEQ ID NO: 63764 - DNA, 22 bp, synthetic construct
  misc_feature 1..22: note = chemically synthesized
  source 1..22: mol_type = other DNA
agagagtactagtcttagaggg

SEQ ID NO: 63765 - DNA, 22 bp, synthetic construct
  misc_feature 1..22: note = chemically synthesized
  source 1..22: mol_type = other DNA
gagagtactagtcttagagggc

SEQ ID NO: 63766 - DNA, 22 bp, synthetic construct
  misc_feature 1..22: note = chemically synthesized
  source 1..22: mol_type = other DNA
gtcttagagggcagctgagact

SEQ ID NO: 63767 - DNA, 22 bp, synthetic construct
  misc_feature 1..22: note = chemically synthesized
  source 1..22: mol_type = other DNA
agagggcagctgagactttagg

SEQ ID NO: 63768 - DNA, 22 bp, synthetic construct
  misc_feature 1..22: note = chemically synthesized
  source 1..22: mol_type = other DNA
gagggcagctgagactttaggg

SEQ ID NO: 63769 - DNA, 22 bp, synthetic construct
  misc_feature 1..22: note = chemically synthesized
  source 1..22: mol_type = other DNA
agactttagggtgagggagggg

SEQ ID NO: 63770 - DNA, 22 bp, synthetic construct
  misc_feature 1..22: note = chemically synthesized
  source 1..22: mol_type = other DNA
tagggtgagggaggggcttcct

SEQ ID NO: 63771 - DNA, 22 bp, synthetic construct
  misc_feature 1..22: note = chemically synthesized
  source 1..22: mol_type = other DNA
agggtgagggaggggcttccta

SEQ ID NO: 63772 - DNA, 22 bp, synthetic construct
  misc_feature 1..22: note = chemically synthesized
  source 1..22: mol_type = other DNA
gggtgagggaggggcttcctat

SEQ ID NO: 63773 - DNA, 22 bp, synthetic construct
  misc_feature 1..22: note = chemically synthesized
  source 1..22: mol_type = other DNA
cctattacatactgaaaatgaa

SEQ ID NO: 63774 - DNA, 22 bp, synthetic construct
  misc_feature 1..22: note = chemically synthesized
  source 1..22: mol_type = other DNA
ctattacatactgaaaatgaaa

SEQ ID NO: 63775 - DNA, 22 bp, synthetic construct
  misc_feature 1..22: note = chemically synthesized
  source 1..22: mol_type = other DNA
ttacatactgaaaatgaaatct

SEQ ID NO: 63776 - DNA, 22 bp, synthetic construct
  misc_feature 1..22: note = chemically synthesized
  source 1..22: mol_type = other DNA
catactgaaaatgaaatctatc

SEQ ID NO: 63777 - DNA, 22 bp, synthetic construct
  misc_feature 1..22: note = chemically synthesized
  source 1..22: mol_type = other DNA
aaaatgaaatctatcatttgat

SEQ ID NO: 63778 - DNA, 22 bp, synthetic construct
  misc_feature 1..22: note = chemically synthesized
  source 1..22: mol_type = other DNA
tcatttgatttgacagtaacca

SEQ ID NO: 63779 - DNA, 22 bp, synthetic construct
  misc_feature 1..22: note = chemically synthesized
  source 1..22: mol_type = other DNA
gatttgacagtaaccatctggc

SEQ ID NO: 63780 - DNA, 22 bp, synthetic construct
  misc_feature 1..22: note = chemically synthesized
  source 1..22: mol_type = other DNA
atttgacagtaaccatctggct

SEQ ID NO: 63781 - DNA, 22 bp, synthetic construct
  misc_feature 1..22: note = chemically synthesized
  source 1..22: mol_type = other DNA
gacagtaaccatctggctgtaa

SEQ ID NO: 63782 - DNA, 22 bp, synthetic construct
  misc_feature 1..22: note = chemically synthesized
  source 1..22: mol_type = other DNA
acagtaaccatctggctgtaac

SEQ ID NO: 63783 - DNA, 22 bp, synthetic construct
  misc_feature 1..22: note = chemically synthesized
  source 1..22: mol_type = other DNA
gctgtaactaataaaacgtagg

SEQ ID NO: 63784 - DNA, 22 bp, synthetic construct
  misc_feature 1..22: note = chemically synthesized
  source 1..22: mol_type = other DNA
taactaataaaacgtaggcaca

SEQ ID NO: 63785 - DNA, 22 bp, synthetic construct
  misc_feature 1..22: note = chemically synthesized
  source 1..22: mol_type = other DNA
ataaaacgtaggcacagagagg

SEQ ID NO: 63786 - DNA, 22 bp, synthetic construct
  misc_feature 1..22: note = chemically synthesized
  source 1..22: mol_type = other DNA
gacggtcagctcaggagggcac

SEQ ID NO: 63787 - DNA, 22 bp, synthetic construct
  misc_feature 1..22: note = chemically synthesized
  source 1..22: mol_type = other DNA
aggagggcacatccagtgggcc

SEQ ID NO: 63788 - DNA, 22 bp, synthetic construct
  misc_feature 1..22: note = chemically synthesized
  source 1..22: mol_type = other DNA
ggaaggacccccagaagctcag

SEQ ID NO: 63789 - DNA, 22 bp, synthetic construct
  misc_feature 1..22: note = chemically synthesized
  source 1..22: mol_type = other DNA
aggcttctgccccctcctttct

SEQ ID NO: 63790 - DNA, 22 bp, synthetic construct
  misc_feature 1..22: note = chemically synthesized
  source 1..22: mol_type = other DNA
ctgccccctcctttctcaggac

SEQ ID NO: 63791 - DNA, 22 bp, synthetic construct
  misc_feature 1..22: note = chemically synthesized
  source 1..22: mol_type = other DNA
tgccccctcctttctcaggaca

SEQ ID NO: 63792 - DNA, 22 bp, synthetic construct
  misc_feature 1..22: note = chemically synthesized
  source 1..22: mol_type = other DNA
ccccctcctttctcaggacaca

SEQ ID NO: 63793 - DNA, 22 bp, synthetic construct
  misc_feature 1..22: note = chemically synthesized
  source 1..22: mol_type = other DNA
ctttctcaggacacagcgctgc

SEQ ID NO: 63794 - DNA, 22 bp, synthetic construct
  misc_feature 1..22: note = chemically synthesized
  source 1..22: mol_type = other DNA
tctcaggacacagcgctgcagg

SEQ ID NO: 63795 - DNA, 22 bp, synthetic construct
  misc_feature 1..22: note = chemically synthesized
  source 1..22: mol_type = other DNA
ctcaggacacagcgctgcaggg

SEQ ID NO: 63796 - DNA, 22 bp, synthetic construct
  misc_feature 1..22: note = chemically synthesized
  source 1..22: mol_type = other DNA
tcaggacacagcgctgcagggc

SEQ ID NO: 63797 - DNA, 22 bp, synthetic construct
  misc_feature 1..22: note = chemically synthesized
  source 1..22: mol_type = other DNA
aggacacagcgctgcagggcgg

SEQ ID NO: 63798 - DNA, 22 bp, synthetic construct
  misc_feature 1..22: note = chemically synthesized
  source 1..22: mol_type = other DNA
cagggcggtgactctcacgagc

SEQ ID NO: 63799 - DNA, 22 bp, synthetic construct
  misc_feature 1..22: note = chemically synthesized
  source 1..22: mol_type = other DNA
tcacgagccctttgcccatgga

SEQ ID NO: 63800 - DNA, 22 bp, synthetic construct
  misc_feature 1..22: note = chemically synthesized
  source 1..22: mol_type = other DNA
acgagccctttgcccatggatg

SEQ ID NO: 63801 - DNA, 22 bp, synthetic construct
  misc_feature 1..22: note = chemically synthesized
  source 1..22: mol_type = other DNA
tgcccatggatgcccgtgcctc

SEQ ID NO: 63802 - DNA, 22 bp, synthetic construct
  misc_feature 1..22: note = chemically synthesized
  source 1..22: mol_type = other DNA
gcccatggatgcccgtgcctct

SEQ ID NO: 63803 - DNA, 22 bp, synthetic construct
  misc_feature 1..22: note = chemically synthesized
  source 1..22: mol_type = other DNA
cccatggatgcccgtgcctctc

SEQ ID NO: 63804 - DNA, 22 bp, synthetic construct
  misc_feature 1..22: note = chemically synthesized
  source 1..22: mol_type = other DNA
tctggactccatccaggttctg

SEQ ID NO: 63805 - DNA, 22 bp, synthetic construct
  misc_feature 1..22: note = chemically synthesized
  source 1..22: mol_type = other DNA
tggactccatccaggttctgta

SEQ ID NO: 63806 - DNA, 22 bp, synthetic construct
  misc_feature 1..22: note = chemically synthesized
  source 1..22: mol_type = other DNA
gactccatccaggttctgtaat

SEQ ID NO: 63807 - DNA, 22 bp, synthetic construct
  misc_feature 1..22: note = chemically synthesized
  source 1..22: mol_type = other DNA
catccaggttctgtaataggca

SEQ ID NO: 63808 - DNA, 22 bp, synthetic construct
  misc_feature 1..22: note = chemically synthesized
  source 1..22: mol_type = other DNA
tgtaataggcagatttccaata

SEQ ID NO: 63809 - DNA, 22 bp, synthetic construct
  misc_feature 1..22: note = chemically synthesized
  source 1..22: mol_type = other DNA
taataggcagatttccaatact

SEQ ID NO: 63810 - DNA, 22 bp, synthetic construct
  misc_feature 1..22: note = chemically synthesized
  source 1..22: mol_type = other DNA
ccaatactactgtgctattcag

SEQ ID NO: 63811 - DNA, 22 bp, synthetic construct
  misc_feature 1..22: note = chemically synthesized
  source 1..22: mol_type = other DNA
caatactactgtgctattcagg

SEQ ID NO: 63812 - DNA, 22 bp, synthetic construct
  misc_feature 1..22: note = chemically synthesized
  source 1..22: mol_type = other DNA
ctgtgctattcaggaaagtatt

SEQ ID NO: 63813 - DNA, 22 bp, synthetic construct
  misc_feature 1..22: note = chemically synthesized
  source 1..22: mol_type = other DNA
tgctattcaggaaagtattgca

SEQ ID NO: 63814 - DNA, 22 bp, synthetic construct
  misc_feature 1..22: note = chemically synthesized
  source 1..22: mol_type = other DNA
ttcaggaaagtattgcagaagt

SEQ ID NO: 63815 - DNA, 22 bp, synthetic construct
  misc_feature 1..22: note = chemically synthesized
  source 1..22: mol_type = other DNA
aggaaagtattgcagaagtgaa

SEQ ID NO: 63816 - DNA, 22 bp, synthetic construct
  misc_feature 1..22: note = chemically synthesized
  source 1..22: mol_type = other DNA
cagaagtgaattaatttgtgcc

SEQ ID NO: 63817 - DNA, 22 bp, synthetic construct
  misc_feature 1..22: note = chemically synthesized
  source 1..22: mol_type = other DNA
atttgtgccaattgaagagcat

SEQ ID NO: 63818 - DNA, 22 bp, synthetic construct
  misc_feature 1..22: note = chemically synthesized
  source 1..22: mol_type = other DNA
gtgccaattgaagagcatgaca

SEQ ID NO: 63819 - DNA, 22 bp, synthetic construct
  misc_feature 1..22: note = chemically synthesized
  source 1..22: mol_type = other DNA
tgccaattgaagagcatgacaa

SEQ ID NO: 63820 - DNA, 22 bp, synthetic construct
  misc_feature 1..22: note = chemically synthesized
  source 1..22: mol_type = other DNA
aagagcatgacaaaagtacaaa

SEQ ID NO: 63821 - DNA, 22 bp, synthetic construct
  misc_feature 1..22: note = chemically synthesized
  source 1..22: mol_type = other DNA
tcctcatgtcccctcaaggtca

SEQ ID NO: 63822 - DNA, 22 bp, synthetic construct
  misc_feature 1..22: note = chemically synthesized
  source 1..22: mol_type = other DNA
ctcatgtcccctcaaggtcagt

SEQ ID NO: 63823 - DNA, 22 bp, synthetic construct
  misc_feature 1..22: note = chemically synthesized
  source 1..22: mol_type = other DNA
atgtcccctcaaggtcagtttc

SEQ ID NO: 63824 - DNA, 22 bp, synthetic construct
  misc_feature 1..22: note = chemically synthesized
  source 1..22: mol_type = other DNA
aaggtcagtttcatccataaca

SEQ ID NO: 63825 - DNA, 22 bp, synthetic construct
  misc_feature 1..22: note = chemically synthesized
  source 1..22: mol_type = other DNA
catccataacaggtaaacgagg

SEQ ID NO: 63826 - DNA, 22 bp, synthetic construct
  misc_feature 1..22: note = chemically synthesized
  source 1..22: mol_type = other DNA
atccataacaggtaaacgaggt

SEQ ID NO: 63827 - DNA, 22 bp, synthetic construct
  misc_feature 1..22: note = chemically synthesized
  source 1..22: mol_type = other DNA
agcttctgtctgcaggggctgg

SEQ ID NO: 63828 - DNA, 22 bp, synthetic construct
  misc_feature 1..22: note = chemically synthesized
  source 1..22: mol_type = other DNA
ctgtctgcaggggctgggacgc

SEQ ID NO: 63829 - DNA, 22 bp, synthetic construct
  misc_feature 1..22: note = chemically synthesized
  source 1..22: mol_type = other DNA
tgtctgcaggggctgggacgct

SEQ ID NO: 63830 - DNA, 22 bp, synthetic construct
  misc_feature 1..22: note = chemically synthesized
  source 1..22: mol_type = other DNA
tctgcaggggctgggacgctta

SEQ ID NO: 63831 - DNA, 22 bp, synthetic construct
  misc_feature 1..22: note = chemically synthesized
  source 1..22: mol_type = other DNA
caggggctgggacgcttacctg

SEQ ID NO: 63832 - DNA, 22 bp, synthetic construct
  misc_feature 1..22: note = chemically synthesized
  source 1..22: mol_type = other DNA
ggacgcttacctggtccagtct

SEQ ID NO: 63833 - DNA, 22 bp, synthetic construct
  misc_feature 1..22: note = chemically synthesized
  source 1..22: mol_type = other DNA
acctggtccagtctcacaggtt

SEQ ID NO: 63834 - DNA, 22 bp, synthetic construct
  misc_feature 1..22: note = chemically synthesized
  source 1..22: mol_type = other DNA
cctggtccagtctcacaggtta

SEQ ID NO: 63835 - DNA, 22 bp, synthetic construct
  misc_feature 1..22: note = chemically synthesized
  source 1..22: mol_type = other DNA
gtccagtctcacaggttacagg

SEQ ID NO: 63836 - DNA, 22 bp, synthetic construct
  misc_feature 1..22: note = chemically synthesized
  source 1..22: mol_type = other DNA
acaggttacagggaactgcttt

SEQ ID NO: 63837 - DNA, 22 bp, synthetic construct
  misc_feature 1..22: note = chemically synthesized
  source 1..22: mol_type = other DNA
cagggaactgctttatcagggg

SEQ ID NO: 63838 - DNA, 22 bp, synthetic construct
  misc_feature 1..22: note = chemically synthesized
  source 1..22: mol_type = other DNA
ctttatcaggggcacggaagtg

SEQ ID NO: 63839 - DNA, 22 bp, synthetic construct
  misc_feature 1..22: note = chemically synthesized
  source 1..22: mol_type = other DNA
tatcaggggcacggaagtgttg

SEQ ID NO: 63840 - DNA, 22 bp, synthetic construct
  misc_feature 1..22: note = chemically synthesized
  source 1..22: mol_type = other DNA
atcaggggcacggaagtgttgc

SEQ ID NO: 63841 - DNA, 22 bp, synthetic construct
  misc_feature 1..22: note = chemically synthesized
  source 1..22: mol_type = other DNA
tcaggggcacggaagtgttgct

SEQ ID NO: 63842 - DNA, 22 bp, synthetic construct
  misc_feature 1..22: note = chemically synthesized
  source 1..22: mol_type = other DNA
ctgtagtagtcagtatccaaaa

SEQ ID NO: 63843 - DNA, 22 bp, synthetic construct
  misc_feature 1..22: note = chemically synthesized
  source 1..22: mol_type = other DNA
tagtagtcagtatccaaaaccc

SEQ ID NO: 63844 - DNA, 22 bp, synthetic construct
  misc_feature 1..22: note = chemically synthesized
  source 1..22: mol_type = other DNA
tccaaagagaatcctatggaaa

SEQ ID NO: 63845 - DNA, 22 bp, synthetic construct
  misc_feature 1..22: note = chemically synthesized
  source 1..22: mol_type = other DNA
tggaaaaacagaacaagtttct

SEQ ID NO: 63846 - DNA, 22 bp, synthetic construct
  misc_feature 1..22: note = chemically synthesized
  source 1..22: mol_type = other DNA
ctggggttactgaatgaatgct

SEQ ID NO: 63847 - DNA, 22 bp, synthetic construct
  misc_feature 1..22: note = chemically synthesized
  source 1..22: mol_type = other DNA
tggggttactgaatgaatgctt

SEQ ID NO: 63848 - DNA, 22 bp, synthetic construct
  misc_feature 1..22: note = chemically synthesized
  source 1..22: mol_type = other DNA
gggttactgaatgaatgctttt

SEQ ID NO: 63849 - DNA, 22 bp, synthetic construct
  misc_feature 1..22: note = chemically synthesized
  source 1..22: mol_type = other DNA
ctgaatgaatgcttttgcccaa

SEQ ID NO: 63850 - DNA, 22 bp, synthetic construct
  misc_feature 1..22: note = chemically synthesized
  source 1..22: mol_type = other DNA
aatgaatgcttttgcccaaagc

SEQ ID NO: 63851 - DNA, 22 bp, synthetic construct
  misc_feature 1..22: note = chemically synthesized
  source 1..22: mol_type = other DNA
ttgcccaaagcctacaccttca

SEQ ID NO: 63852 - DNA, 22 bp, synthetic construct
  misc_feature 1..22: note = chemically synthesized
  source 1..22: mol_type = other DNA
tgcccaaagcctacaccttcaa

SEQ ID NO: 63853 - DNA, 22 bp, synthetic construct
  misc_feature 1..22: note = chemically synthesized
  source 1..22: mol_type = other DNA
gcccaaagcctacaccttcaag

SEQ ID NO: 63854 - DNA, 22 bp, synthetic construct
  misc_feature 1..22: note = chemically synthesized
  source 1..22: mol_type = other DNA
cccaaagcctacaccttcaaga

SEQ ID NO: 63855 - DNA, 22 bp, synthetic construct
  misc_feature 1..22: note = chemically synthesized
  source 1..22: mol_type = other DNA
caccttcaagaagagtgtagcc

SEQ ID NO: 63856 - DNA, 22 bp, synthetic construct
  misc_feature 1..22: note = chemically synthesized
  source 1..22: mol_type = other DNA
caagaagagtgtagcctgagaa

SEQ ID NO: 63857 - DNA, 22 bp, synthetic construct
  misc_feature 1..22: note = chemically synthesized
  source 1..22: mol_type = other DNA
aagaagagtgtagcctgagaag

SEQ ID NO: 63858 - DNA, 22 bp, synthetic construct
  misc_feature 1..22: note = chemically synthesized
  source 1..22: mol_type = other DNA
agaaggatttcacatgttgcct

SEQ ID NO: 63859 - DNA, 22 bp, synthetic construct
  misc_feature 1..22: note = chemically synthesized
  source 1..22: mol_type = other DNA
cacatgttgcctctagaaggga

SEQ ID NO: 63860 - DNA, 22 bp, synthetic construct
  misc_feature 1..22: note = chemically synthesized
  source 1..22: mol_type = other DNA
acatgttgcctctagaagggag

SEQ ID NO: 63861 - DNA, 22 bp, synthetic construct
  misc_feature 1..22: note = chemically synthesized
  source 1..22: mol_type = other DNA
cctctagaagggagaactgggt

SEQ ID NO: 63862 - DNA, 22 bp, synthetic construct
  misc_feature 1..22: note = chemically synthesized
  source 1..22: mol_type = other DNA
tagaagggagaactgggtggct

SEQ ID NO: 63863 - DNA, 22 bp, synthetic construct
  misc_feature 1..22: note = chemically synthesized
  source 1..22: mol_type = other DNA
gaagggagaactgggtggctgg

SEQ ID NO: 63864 - DNA, 22 bp, synthetic construct
  misc_feature 1..22: note = chemically synthesized
  source 1..22: mol_type = other DNA
ggtggctggggagaagtgtgag

SEQ ID NO: 63865 - DNA, 22 bp, synthetic construct
  misc_feature 1..22: note = chemically synthesized
  source 1..22: mol_type = other DNA
gggagaagtgtgagagggagat

SEQ ID NO: 63866 - DNA, 22 bp, synthetic construct
  misc_feature 1..22: note = chemically synthesized
  source 1..22: mol_type = other DNA
catgacacttccttatgtatgt

SEQ ID NO: 63867 - DNA, 22 bp, synthetic construct
  misc_feature 1..22: note = chemically synthesized
  source 1..22: mol_type = other DNA
atgacacttccttatgtatgta

SEQ ID NO: 63868 - DNA, 22 bp, synthetic construct
  misc_feature 1..22: note = chemically synthesized
  source 1..22: mol_type = other DNA
ccttatgtatgtaacttttgca

SEQ ID NO: 63869 - DNA, 22 bp, synthetic construct
  misc_feature 1..22: note = chemically synthesized
  source 1..22: mol_type = other DNA
cttatgtatgtaacttttgcat

SEQ ID NO: 63870 - DNA, 22 bp, synthetic construct
  misc_feature 1..22: note = chemically synthesized
  source 1..22: mol_type = other DNA
atgtatgtaacttttgcatttt

SEQ ID NO: 63871 - DNA, 22 bp, synthetic construct
  misc_feature 1..22: note = chemically synthesized
  source 1..22: mol_type = other DNA
tgtatgtaacttttgcattttg

SEQ ID NO: 63872 - DNA, 22 bp, synthetic construct
  misc_feature 1..22: note = chemically synthesized
  source 1..22: mol_type = other DNA
ttgcattttgaactgtttgaat

SEQ ID NO: 63873 - DNA, 22 bp, synthetic construct
  misc_feature 1..22: note = chemically synthesized
  source 1..22: mol_type = other DNA
tgcattttgaactgtttgaatg

SEQ ID NO: 63874 - DNA, 22 bp, synthetic construct
  misc_feature 1..22: note = chemically synthesized
  source 1..22: mol_type = other DNA
gcattttgaactgtttgaatgt

SEQ ID NO: 63875 - DNA, 22 bp, synthetic construct
  misc_feature 1..22: note = chemically synthesized
  source 1..22: mol_type = other DNA
cattttgaactgtttgaatgta

SEQ ID NO: 63876 - DNA, 22 bp, synthetic construct
  misc_feature 1..22: note = chemically synthesized
  source 1..22: mol_type = other DNA
tgaactgtttgaatgtattatc

SEQ ID NO: 63877 - DNA, 22 bp, synthetic construct
  misc_feature 1..22: note = chemically synthesized
  source 1..22: mol_type = other DNA
gaactgtttgaatgtattatct

SEQ ID NO: 63878 - DNA, 22 bp, synthetic construct
  misc_feature 1..22: note = chemically synthesized
  source 1..22: mol_type = other DNA
aactgtttgaatgtattatctt

SEQ ID NO: 63879 - DNA, 22 bp, synthetic construct
  misc_feature 1..22: note = chemically synthesized
  source 1..22: mol_type = other DNA
tttgaatgtattatcttttttt

SEQ ID NO: 63880 - DNA, 22 bp, synthetic construct
  misc_feature 1..22: note = chemically synthesized
  source 1..22: mol_type = other DNA
gaatgtattatctttttttttt

SEQ ID NO: 63881 - DNA, 22 bp, synthetic construct
  misc_feature 1..22: note = chemically synthesized
  source 1..22: mol_type = other DNA
aatgtattatcttttttttttt

SEQ ID NO: 63882 - DNA, 22 bp, synthetic construct
  misc_feature 1..22: note = chemically synthesized
  source 1..22: mol_type = other DNA
tcttttttttttttgagacagg

SEQ ID NO: 63883 - DNA, 22 bp, synthetic construct
  misc_feature 1..22: note = chemically synthesized
  source 1..22: mol_type = other DNA
ttttttttttgagacaggatct

SEQ ID NO: 63884 - DNA, 22 bp, synthetic construct
  misc_feature 1..22: note = chemically synthesized
  source 1..22: mol_type = other DNA
tttttttttgagacaggatctg

SEQ ID NO: 63885 - DNA, 22 bp, synthetic construct
  misc_feature 1..22: note = chemically synthesized
  source 1..22: mol_type = other DNA
ttttttttgagacaggatctgg

SEQ ID NO: 63886 - DNA, 22 bp, synthetic construct
  misc_feature 1..22: note = chemically synthesized
  source 1..22: mol_type = other DNA
tttttttgagacaggatctggc

SEQ ID NO: 63887 - DNA, 22 bp, synthetic construct
  misc_feature 1..22: note = chemically synthesized
  source 1..22: mol_type = other DNA
ttttttgagacaggatctggct

SEQ ID NO: 63888 - DNA, 22 bp, synthetic construct
  misc_feature 1..22: note = chemically synthesized
  source 1..22: mol_type = other DNA
tttttgagacaggatctggctc

SEQ ID NO: 63889 - DNA, 22 bp, synthetic construct
  misc_feature 1..22: note = chemically synthesized
  source 1..22: mol_type = other DNA
ttttgagacaggatctggctca

SEQ ID NO: 63890 - DNA, 22 bp, synthetic construct
  misc_feature 1..22: note = chemically synthesized
  source 1..22: mol_type = other DNA
tttgagacaggatctggctcag

SEQ ID NO: 63891 - DNA, 22 bp, synthetic construct
  misc_feature 1..22: note = chemically synthesized
  source 1..22: mol_type = other DNA
ttgagacaggatctggctcagt

SEQ ID NO: 63892 - DNA, 22 bp, synthetic construct
  misc_feature 1..22: note = chemically synthesized
  source 1..22: mol_type = other DNA
tgagacaggatctggctcagta

SEQ ID NO: 63893 - DNA, 22 bp, synthetic construct
  misc_feature 1..22: note = chemically synthesized
  source 1..22: mol_type = other DNA
gagacaggatctggctcagtaa

SEQ ID NO: 63894 - DNA, 22 bp, synthetic construct
  misc_feature 1..22: note = chemically synthesized
  source 1..22: mol_type = other DNA
agacaggatctggctcagtaac

SEQ ID NO: 63895 - DNA, 22 bp, synthetic construct
  misc_feature 1..22: note = chemically synthesized
  source 1..22: mol_type = other DNA
gctcagtaacccagcctggagt

SEQ ID NO: 63896 - DNA, 22 bp, synthetic construct
  misc_feature 1..22: note = chemically synthesized
  source 1..22: mol_type = other DNA
agtaacccagcctggagtgcag

SEQ ID NO: 63897 - DNA, 22 bp, synthetic construct
  misc_feature 1..22: note = chemically synthesized
  source 1..22: mol_type = other DNA
gagtgcagtggcgcaatctcgg

SEQ ID NO: 63898 - DNA, 22 bp, synthetic construct
  misc_feature 1..22: note = chemically synthesized
  source 1..22: mol_type = other DNA
ggctcattgtgacctctacctc

SEQ ID NO: 63899 - DNA, 22 bp, synthetic construct
  misc_feature 1..22: note = chemically synthesized
  source 1..22: mol_type = other DNA
attgtgacctctacctcctggg

SEQ ID NO: 63900 - DNA, 22 bp, synthetic construct
  misc_feature 1..22: note = chemically synthesized
  source 1..22: mol_type = other DNA
tgacctctacctcctgggatcc

SEQ ID NO: 63901 - DNA, 22 bp, synthetic construct
  misc_feature 1..22: note = chemically synthesized
  source 1..22: mol_type = other DNA
tacctcctgggatcctcccacc

SEQ ID NO: 63902 - DNA, 22 bp, synthetic construct
  misc_feature 1..22: note = chemically synthesized
  source 1..22: mol_type = other DNA
cctcctgggatcctcccacctc

SEQ ID NO: 63903 - DNA, 22 bp, synthetic construct
  misc_feature 1..22: note = chemically synthesized
  source 1..22: mol_type = other DNA
ctgggatcctcccacctcagcc

SEQ ID NO: 63904 - DNA, 22 bp, synthetic construct
  misc_feature 1..22: note = chemically synthesized
  source 1..22: mol_type = other DNA
ggatcctcccacctcagcctcc

SEQ ID NO: 63905 - DNA, 22 bp, synthetic construct
  misc_feature 1..22: note = chemically synthesized
  source 1..22: mol_type = other DNA
ccacctcagcctcctgaatagc

SEQ ID NO: 63906 - DNA, 22 bp, synthetic construct
  misc_feature 1..22: note = chemically synthesized
  source 1..22: mol_type = other DNA
agcctcctgaatagctgggact

SEQ ID NO: 63907 - DNA, 22 bp, synthetic construct
  misc_feature 1..22: note = chemically synthesized
  source 1..22: mol_type = other DNA
ctgaatagctgggactacaggt

SEQ ID NO: 63908 - DNA, 22 bp, synthetic construct
  misc_feature 1..22: note = chemically synthesized
  source 1..22: mol_type = other DNA
aatagctgggactacaggtgtg

SEQ ID NO: 63909 - DNA, 22 bp, synthetic construct
  misc_feature 1..22: note = chemically synthesized
  source 1..22: mol_type = other DNA
ggactacaggtgtgtgccacca

SEQ ID NO: 63910 - DNA, 22 bp, synthetic construct
  misc_feature 1..22: note = chemically synthesized
  source 1..22: mol_type = other DNA
caggtgtgtgccaccacatcca

SEQ ID NO: 63911 - DNA, 22 bp, synthetic construct
  misc_feature 1..22: note = chemically synthesized
  source 1..22: mol_type = other DNA
gtttttgtatttttagtagaga

SEQ ID NO: 63912 - DNA, 22 bp, synthetic construct
  misc_feature 1..22: note = chemically synthesized
  source 1..22: mol_type = other DNA
ttgtatttttagtagagacggg

SEQ ID NO: 63913 - DNA, 22 bp, synthetic construct
  misc_feature 1..22: note = chemically synthesized
  source 1..22: mol_type = other DNA
tgtatttttagtagagacgggg

SEQ ID NO: 63914 - DNA, 22 bp, synthetic construct
  misc_feature 1..22: note = chemically synthesized
  source 1..22: mol_type = other DNA
gtatttttagtagagacggggt

SEQ ID NO: 63915 - DNA, 22 bp, synthetic construct
  misc_feature 1..22: note = chemically synthesized
  source 1..22: mol_type = other DNA
tatttttagtagagacggggtt

SEQ ID NO: 63916 - DNA, 22 bp, synthetic construct
  misc_feature 1..22: note = chemically synthesized
  source 1..22: mol_type = other DNA
ttagtagagacggggtttcacc

SEQ ID NO: 63917 - DNA, 22 bp, synthetic construct
  misc_feature 1..22: note = chemically synthesized
  source 1..22: mol_type = other DNA
tagtagagacggggtttcacca

SEQ ID NO: 63918 - DNA, 22 bp, synthetic construct
  misc_feature 1..22: note = chemically synthesized
  source 1..22: mol_type = other DNA
agtagagacggggtttcaccat

SEQ ID NO: 63919 - DNA, 22 bp, synthetic construct
  misc_feature 1..22: note = chemically synthesized
  source 1..22: mol_type = other DNA
gtagagacggggtttcaccatg

SEQ ID NO: 63920 - DNA, 22 bp, synthetic construct
  misc_feature 1..22: note = chemically synthesized
  source 1..22: mol_type = other DNA
caccatgttgcccaggctggtc

SEQ ID NO: 63921 - DNA, 22 bp, synthetic construct
  misc_feature 1..22: note = chemically synthesized
  source 1..22: mol_type = other DNA
accatgttgcccaggctggtct

SEQ ID NO: 63922 - DNA, 22 bp, synthetic construct
  misc_feature 1..22: note = chemically synthesized
  source 1..22: mol_type = other DNA
cccaggctggtctccatctcct

SEQ ID NO: 63923 - DNA, 22 bp, synthetic construct
  misc_feature 1..22: note = chemically synthesized
  source 1..22: mol_type = other DNA
gtctccatctcctgaactcagg

SEQ ID NO: 63924 - DNA, 22 bp, synthetic construct
  misc_feature 1..22: note = chemically synthesized
  source 1..22: mol_type = other DNA
catctcctgaactcaggcaatc

SEQ ID NO: 63925 - DNA, 22 bp, synthetic construct
  misc_feature 1..22: note = chemically synthesized
  source 1..22: mol_type = other DNA
ctgaactcaggcaatcctccca

SEQ ID NO: 63926 - DNA, 22 bp, synthetic construct
  misc_feature 1..22: note = chemically synthesized
  source 1..22: mol_type = other DNA
aactcaggcaatcctcccacct

SEQ ID NO: 63927 - DNA, 22 bp, synthetic construct
  misc_feature 1..22: note = chemically synthesized
  source 1..22: mol_type = other DNA
aggcaatcctcccacctcagcc

SEQ ID NO: 63928 - DNA, 22 bp, synthetic construct
  misc_feature 1..22: note = chemically synthesized
  source 1..22: mol_type = other DNA
ccacctcagcctcccaaagtgc

SEQ ID NO: 63929 - DNA, 22 bp, synthetic construct
  misc_feature 1..22: note = chemically synthesized
  source 1..22: mol_type = other DNA
agcctcccaaagtgctgggatt

SEQ ID NO: 63930 - DNA, 22 bp, synthetic construct
  misc_feature 1..22: note = chemically synthesized
  source 1..22: mol_type = other DNA
ccaaagtgctgggattacaggc

SEQ ID NO: 63931 - DNA, 22 bp, synthetic construct
  misc_feature 1..22: note = chemically synthesized
  source 1..22: mol_type = other DNA
ggattacaggcatgagccaccg

SEQ ID NO: 63932 - DNA, 22 bp, synthetic construct
  misc_feature 1..22: note = chemically synthesized
  source 1..22: mol_type = other DNA
caggcatgagccaccgtgcctg

SEQ ID NO: 63933 - DNA, 22 bp, synthetic construct
  misc_feature 1..22: note = chemically synthesized
  source 1..22: mol_type = other DNA
actgtatgatctatttaaacac

SEQ ID NO: 63934 - DNA, 22 bp, synthetic construct
  misc_feature 1..22: note = chemically synthesized
  source 1..22: mol_type = other DNA
tatgatctatttaaacacaaat

SEQ ID NO: 63935 - DNA, 22 bp, synthetic construct
  misc_feature 1..22: note = chemically synthesized
  source 1..22: mol_type = other DNA
tttaaacacaaataatgaagcc

SEQ ID NO: 63936 - DNA, 22 bp, synthetic construct
  misc_feature 1..22: note = chemically synthesized
  source 1..22: mol_type = other DNA
aaacacaaataatgaagcccaa

SEQ ID NO: 63937 - DNA, 22 bp, synthetic construct
  misc_feature 1..22: note = chemically synthesized
  source 1..22: mol_type = other DNA
aacacaaataatgaagcccaag

SEQ ID NO: 63938 - DNA, 22 bp, synthetic construct
  misc_feature 1..22: note = chemically synthesized
  source 1..22: mol_type = other DNA
tgaactccaggcaggcgcggtg

SEQ ID NO: 63939 - DNA, 22 bp, synthetic construct
  misc_feature 1..22: note = chemically synthesized
  source 1..22: mol_type = other DNA
aactccaggcaggcgcggtggc

SEQ ID NO: 63940 - DNA, 22 bp, synthetic construct
  misc_feature 1..22: note = chemically synthesized
  source 1..22: mol_type = other DNA
caggcaggcgcggtggctcaca

SEQ ID NO: 63941 - DNA, 22 bp, synthetic construct
  misc_feature 1..22: note = chemically synthesized
  source 1..22: mol_type = other DNA
acacctgtaatctcagcacttt

SEQ ID NO: 63942 - DNA, 22 bp, synthetic construct
  misc_feature 1..22: note = chemically synthesized
  source 1..22: mol_type = other DNA
taatctcagcactttgggaggc

SEQ ID NO: 63943 - DNA, 22 bp, synthetic construct
  misc_feature 1..22: note = chemically synthesized
  source 1..22: mol_type = other DNA
agcactttgggaggccaaggca

SEQ ID NO: 63944 - DNA, 22 bp, synthetic construct
  misc_feature 1..22: note = chemically synthesized
  source 1..22: mol_type = other DNA
tgggaggccaaggcaggcagat

SEQ ID NO: 63945 - DNA, 22 bp, synthetic construct
  misc_feature 1..22: note = chemically synthesized
  source 1..22: mol_type = other DNA
gggaggccaaggcaggcagatc

SEQ ID NO: 63946 - DNA, 22 bp, synthetic construct
  misc_feature 1..22: note = chemically synthesized
  source 1..22: mol_type = other DNA
ggaggccaaggcaggcagatca

SEQ ID NO: 63947 - DNA, 22 bp, synthetic construct
  misc_feature 1..22: note = chemically synthesized
  source 1..22: mol_type = other DNA
gagaccagcctggccaacatgg

SEQ ID NO: 63948 - DNA, 22 bp, synthetic construct
  misc_feature 1..22: note = chemically synthesized
  source 1..22: mol_type = other DNA
agaccagcctggccaacatggt

SEQ ID NO: 63949 - DNA, 22 bp, synthetic construct
  misc_feature 1..22: note = chemically synthesized
  source 1..22: mol_type = other DNA
gccaacatggtgaaacaccgtt

SEQ ID NO: 63950 - DNA, 22 bp, synthetic construct
  misc_feature 1..22: note = chemically synthesized
  source 1..22: mol_type = other DNA
ctaccaaaaaatataaagaatt

SEQ ID NO: 63951 - DNA, 22 bp, synthetic construct
  misc_feature 1..22: note = chemically synthesized
  source 1..22: mol_type = other DNA
taccaaaaaatataaagaatta

SEQ ID NO: 63952 - DNA, 22 bp, synthetic construct
  misc_feature 1..22: note = chemically synthesized
  source 1..22: mol_type = other DNA
ccaaaaaatataaagaattagc

SEQ ID NO: 63953 - DNA, 22 bp, synthetic construct
  misc_feature 1..22: note = chemically synthesized
  source 1..22: mol_type = other DNA
gccagatgtggtggtgcgtgac

SEQ ID NO: 63954 - DNA, 22 bp, synthetic construct
  misc_feature 1..22: note = chemically synthesized
  source 1..22: mol_type = other DNA
taatcccagctactcgggaggc

SEQ ID NO: 63955 - DNA, 22 bp, synthetic construct
  misc_feature 1..22: note = chemically synthesized
  source 1..22: mol_type = other DNA
ctcgggaggctaaggcaagaga

SEQ ID NO: 63956 - DNA, 22 bp, synthetic construct
  misc_feature 1..22: note = chemically synthesized
  source 1..22: mol_type = other DNA
gggaggctaaggcaagagaatc

SEQ ID NO: 63957 - DNA, 22 bp, synthetic construct
  misc_feature 1..22: note = chemically synthesized
  source 1..22: mol_type = other DNA
aggcaagagaatcgcttgaacc

SEQ ID NO: 63958 - DNA, 22 bp, synthetic construct
  misc_feature 1..22: note = chemically synthesized
  source 1..22: mol_type = other DNA
gaacctgggaggcggaggttgc

SEQ ID NO: 63959 - DNA, 22 bp, synthetic construct
  misc_feature 1..22: note = chemically synthesized
  source 1..22: mol_type = other DNA
aacctgggaggcggaggttgcc

SEQ ID NO: 63960 - DNA, 22 bp, synthetic construct
  misc_feature 1..22: note = chemically synthesized
  source 1..22: mol_type = other DNA
ggaggcggaggttgccgtgagc

SEQ ID NO: 63961 - DNA, 22 bp, synthetic construct
  misc_feature 1..22: note = chemically synthesized
  source 1..22: mol_type = other DNA
ccgtgagccgagattatgccac

SEQ ID NO: 63962 - DNA, 22 bp, synthetic construct
  misc_feature 1..22: note = chemically synthesized
  source 1..22: mol_type = other DNA
tgccactgcactacaggctggg

SEQ ID NO: 63963 - DNA, 22 bp, synthetic construct
  misc_feature 1..22: note = chemically synthesized
  source 1..22: mol_type = other DNA
cactacaggctgggtgacagag

SEQ ID NO: 63964 - DNA, 22 bp, synthetic construct
  misc_feature 1..22: note = chemically synthesized
  source 1..22: mol_type = other DNA
caggctgggtgacagagcaaga

SEQ ID NO: 63965 - DNA, 22 bp, synthetic construct
  misc_feature 1..22: note = chemically synthesized
  source 1..22: mol_type = other DNA
ggtgacagagcaagactccatc

SEQ ID NO: 63966 - DNA, 22 bp, synthetic construct
  misc_feature 1..22: note = chemically synthesized
  source 1..22: mol_type = other DNA
catctcaaaaaaaaaaaaaaaa

SEQ ID NO: 63967 - DNA, 22 bp, synthetic construct
  misc_feature 1..22: note = chemically synthesized
  source 1..22: mol_type = other DNA
aaaaaaaaaaaaaaaaaaatcc

SEQ ID NO: 63968 - DNA, 22 bp, synthetic construct
  misc_feature 1..22: note = chemically synthesized
  source 1..22: mol_type = other DNA
aaatccataaaatggcagctat

SEQ ID NO: 63969 - DNA, 22 bp, synthetic construct
  misc_feature 1..22: note = chemically synthesized
  source 1..22: mol_type = other DNA
tgtgactttttttttttaacct

SEQ ID NO: 63970 - DNA, 22 bp, synthetic construct
  misc_feature 1..22: note = chemically synthesized
  source 1..22: mol_type = other DNA
tttttttttaacctcaagaagt

SEQ ID NO: 63971 - DNA, 22 bp, synthetic construct
  misc_feature 1..22: note = chemically synthesized
  source 1..22: mol_type = other DNA
ttttttttaacctcaagaagta

SEQ ID NO: 63972 - DNA, 22 bp, synthetic construct
  misc_feature 1..22: note = chemically synthesized
  source 1..22: mol_type = other DNA
tttttttaacctcaagaagtat

SEQ ID NO: 63973 - DNA, 22 bp, synthetic construct
  misc_feature 1..22: note = chemically synthesized
  source 1..22: mol_type = other DNA
ttttttaacctcaagaagtatt

SEQ ID NO: 63974 - DNA, 22 bp, synthetic construct
  misc_feature 1..22: note = chemically synthesized
  source 1..22: mol_type = other DNA
tttttaacctcaagaagtattt

SEQ ID NO: 63975 - DNA, 22 bp, synthetic construct
  misc_feature 1..22: note = chemically synthesized
  source 1..22: mol_type = other DNA
ttttaacctcaagaagtatttg

SEQ ID NO: 63976 - DNA, 22 bp, synthetic construct
  misc_feature 1..22: note = chemically synthesized
  source 1..22: mol_type = other DNA
tttaacctcaagaagtatttgt

SEQ ID NO: 63977 - DNA, 22 bp, synthetic construct
  misc_feature 1..22: note = chemically synthesized
  source 1..22: mol_type = other DNA
ttaacctcaagaagtatttgtc

SEQ ID NO: 63978 - DNA, 22 bp, synthetic construct
  misc_feature 1..22: note = chemically synthesized
  source 1..22: mol_type = other DNA
taacctcaagaagtatttgtcc

SEQ ID NO: 63979 - DNA, 22 bp, synthetic construct
  misc_feature 1..22: note = chemically synthesized
  source 1..22: mol_type = other DNA
aacctcaagaagtatttgtcct

SEQ ID NO: 63980 - DNA, 22 bp, synthetic construct
  misc_feature 1..22: note = chemically synthesized
  source 1..22: mol_type = other DNA
acctcaagaagtatttgtcctg

SEQ ID NO: 63981 - DNA, 22 bp, synthetic construct
  misc_feature 1..22: note = chemically synthesized
  source 1..22: mol_type = other DNA
aagaagtatttgtcctggaaga

SEQ ID NO: 63982 - DNA, 22 bp, synthetic construct
  misc_feature 1..22: note = chemically synthesized
  source 1..22: mol_type = other DNA
gtcctggaagaatgcatatgga

SEQ ID NO: 63983 - DNA, 22 bp, synthetic construct
  misc_feature 1..22: note = chemically synthesized
  source 1..22: mol_type = other DNA
tcctggaagaatgcatatggaa

SEQ ID NO: 63984 - DNA, 22 bp, synthetic construct
  misc_feature 1..22: note = chemically synthesized
  source 1..22: mol_type = other DNA
gaagaatgcatatggaactaca

SEQ ID NO: 63985 - DNA, 22 bp, synthetic construct
  misc_feature 1..22: note = chemically synthesized
  source 1..22: mol_type = other DNA
cagtttgaaacttggacttgca

SEQ ID NO: 63986 - DNA, 22 bp, synthetic construct
  misc_feature 1..22: note = chemically synthesized
  source 1..22: mol_type = other DNA
gaaacttggacttgcatatacc

SEQ ID NO: 63987 - DNA, 22 bp, synthetic construct
  misc_feature 1..22: note = chemically synthesized
  source 1..22: mol_type = other DNA
aaacttggacttgcatatacca

SEQ ID NO: 63988 - DNA, 22 bp, synthetic construct
  misc_feature 1..22: note = chemically synthesized
  source 1..22: mol_type = other DNA
ggacttgcatataccatgggtt

SEQ ID NO: 63989 - DNA, 22 bp, synthetic construct
  misc_feature 1..22: note = chemically synthesized
  source 1..22: mol_type = other DNA
gacttgcatataccatgggttc

SEQ ID NO: 63990 - DNA, 22 bp, synthetic construct
  misc_feature 1..22: note = chemically synthesized
  source 1..22: mol_type = other DNA
gcatataccatgggttccctca

SEQ ID NO: 63991 - DNA, 22 bp, synthetic construct
  misc_feature 1..22: note = chemically synthesized
  source 1..22: mol_type = other DNA
catataccatgggttccctcag

SEQ ID NO: 63992 - DNA, 22 bp, synthetic construct
  misc_feature 1..22: note = chemically synthesized
  source 1..22: mol_type = other DNA
cctcaggcctcagggaatcttg

SEQ ID NO: 63993 - DNA, 22 bp, synthetic construct
  misc_feature 1..22: note = chemically synthesized
  source 1..22: mol_type = other DNA
aggcctcagggaatcttgcatt

SEQ ID NO: 63994 - DNA, 22 bp, synthetic construct
  misc_feature 1..22: note = chemically synthesized
  source 1..22: mol_type = other DNA
agggaatcttgcatttcctctg

SEQ ID NO: 63995 - DNA, 22 bp, synthetic construct
  misc_feature 1..22: note = chemically synthesized
  source 1..22: mol_type = other DNA
gcatttcctctgacatcagaga

SEQ ID NO: 63996 - DNA, 22 bp, synthetic construct
  misc_feature 1..22: note = chemically synthesized
  source 1..22: mol_type = other DNA
catttcctctgacatcagagaa

SEQ ID NO: 63997 - DNA, 22 bp, synthetic construct
  misc_feature 1..22: note = chemically synthesized
  source 1..22: mol_type = other DNA
cctctgacatcagagaatgcac

SEQ ID NO: 63998 - DNA, 22 bp, synthetic construct
  misc_feature 1..22: note = chemically synthesized
  source 1..22: mol_type = other DNA
ctctgacatcagagaatgcact

SEQ ID NO: 63999 - DNA, 22 bp, synthetic construct
  misc_feature 1..22: note = chemically synthesized
  source 1..22: mol_type = other DNA
tgacatcagagaatgcactcca

SEQ ID NO: 64000 - DNA, 22 bp, synthetic construct
  misc_feature 1..22: note = chemically synthesized
  source 1..22: mol_type = other DNA
acatcagagaatgcactccagc

SEQ ID NO: 64001 - DNA, 22 bp, synthetic construct
  misc_feature 1..22: note = chemically synthesized
  source 1..22: mol_type = other DNA
cagcccctaggacgagcccccc

SEQ ID NO: 64002 - DNA, 22 bp, synthetic construct
  misc_feature 1..22: note = chemically synthesized
  source 1..22: mol_type = other DNA
ggacgagccccccccagggaaa

SEQ ID NO: 64003 - DNA, 22 bp, synthetic construct
  misc_feature 1..22: note = chemically synthesized
  source 1..22: mol_type = other DNA
catttccatcagaattgctctc

SEQ ID NO: 64004 - DNA, 22 bp, synthetic construct
  misc_feature 1..22: note = chemically synthesized
  source 1..22: mol_type = other DNA
ccatcagaattgctctctgtaa

SEQ ID NO: 64005 - DNA, 22 bp, synthetic construct
  misc_feature 1..22: note = chemically synthesized
  source 1..22: mol_type = other DNA
catcagaattgctctctgtaag

SEQ ID NO: 64006 - DNA, 22 bp, synthetic construct
  misc_feature 1..22: note = chemically synthesized
  source 1..22: mol_type = other DNA
ctctctgtaaggatgtatatag

SEQ ID NO: 64007 - DNA, 22 bp, synthetic construct
  misc_feature 1..22: note = chemically synthesized
  source 1..22: mol_type = other DNA
tctgtaaggatgtatatagctt

SEQ ID NO: 64008 - DNA, 22 bp, synthetic construct
  misc_feature 1..22: note = chemically synthesized
  source 1..22: mol_type = other DNA
tgtaaggatgtatatagcttca

SEQ ID NO: 64009 - DNA, 22 bp, synthetic construct
  misc_feature 1..22: note = chemically synthesized
  source 1..22: mol_type = other DNA
taaggatgtatatagcttcaga

SEQ ID NO: 64010 - DNA, 22 bp, synthetic construct
  misc_feature 1..22: note = chemically synthesized
  source 1..22: mol_type = other DNA
cagatgcttgttctgtatcctc

SEQ ID NO: 64011 - DNA, 22 bp, synthetic construct
  misc_feature 1..22: note = chemically synthesized
  source 1..22: mol_type = other DNA
agatgcttgttctgtatcctct

SEQ ID NO: 64012 - DNA, 22 bp, synthetic construct
  misc_feature 1..22: note = chemically synthesized
  source 1..22: mol_type = other DNA
gttctgtatcctctctactttg

SEQ ID NO: 64013 - DNA, 22 bp, synthetic construct
  misc_feature 1..22: note = chemically synthesized
  source 1..22: mol_type = other DNA
ttctgtatcctctctactttga

SEQ ID NO: 64014 - DNA, 22 bp, synthetic construct
  misc_feature 1..22: note = chemically synthesized
  source 1..22: mol_type = other DNA
tgtatcctctctactttgaaac

SEQ ID NO: 64015 - DNA, 22 bp, synthetic construct
  misc_feature 1..22: note = chemically synthesized
  source 1..22: mol_type = other DNA
tatcctctctactttgaaacag

SEQ ID NO: 64016 - DNA, 22 bp, synthetic construct
  misc_feature 1..22: note = chemically synthesized
  source 1..22: mol_type = other DNA
tctactttgaaacagagtatct

SEQ ID NO: 64017 - DNA, 22 bp, synthetic construct
  misc_feature 1..22: note = chemically synthesized
  source 1..22: mol_type = other DNA
tactttgaaacagagtatctca

SEQ ID NO: 64018 - DNA, 22 bp, synthetic construct
  misc_feature 1..22: note = chemically synthesized
  source 1..22: mol_type = other DNA
ctttgaaacagagtatctcaga

SEQ ID NO: 64019 - DNA, 22 bp, synthetic construct
  misc_feature 1..22: note = chemically synthesized
  source 1..22: mol_type = other DNA
tgaaacagagtatctcagacaa

SEQ ID NO: 64020 - DNA, 22 bp, synthetic construct
  misc_feature 1..22: note = chemically synthesized
  source 1..22: mol_type = other DNA
gaaacagagtatctcagacaaa

SEQ ID NO: 64021 - DNA, 22 bp, synthetic construct
  misc_feature 1..22: note = chemically synthesized
  source 1..22: mol_type = other DNA
aaacagagtatctcagacaaac

SEQ ID NO: 64022 - DNA, 22 bp, synthetic construct
  misc_feature 1..22: note = chemically synthesized
  source 1..22: mol_type = other DNA
agacaaaccacttcccctttaa

SEQ ID NO: 64023 - DNA, 22 bp, synthetic construct
  misc_feature 1..22: note = chemically synthesized
  source 1..22: mol_type = other DNA
cccctttaaaagtactagatat

SEQ ID NO: 64024 - DNA, 22 bp, synthetic construct
  misc_feature 1..22: note = chemically synthesized
  source 1..22: mol_type = other DNA
ccctttaaaagtactagatata

SEQ ID NO: 64025 - DNA, 22 bp, synthetic construct
  misc_feature 1..22: note = chemically synthesized
  source 1..22: mol_type = other DNA
taaaagtactagatatatcttt

SEQ ID NO: 64026 - DNA, 22 bp, synthetic construct
  misc_feature 1..22: note = chemically synthesized
  source 1..22: mol_type = other DNA
aaaagtactagatatatctttc

SEQ ID NO: 64027 - DNA, 22 bp, synthetic construct
  misc_feature 1..22: note = chemically synthesized
  source 1..22: mol_type = other DNA
aaagtactagatatatctttca

SEQ ID NO: 64028 - DNA, 22 bp, synthetic construct
  misc_feature 1..22: note = chemically synthesized
  source 1..22: mol_type = other DNA
gatatatctttcactgtggaaa

SEQ ID NO: 64029 - DNA, 22 bp, synthetic construct
  misc_feature 1..22: note = chemically synthesized
  source 1..22: mol_type = other DNA
tcactgtggaaataggtgtcaa

SEQ ID NO: 64030 - DNA, 22 bp, synthetic construct
  misc_feature 1..22: note = chemically synthesized
  source 1..22: mol_type = other DNA
cactgtggaaataggtgtcaac

SEQ ID NO: 64031 - DNA, 22 bp, synthetic construct
  misc_feature 1..22: note = chemically synthesized
  source 1..22: mol_type = other DNA
actgtggaaataggtgtcaacc

SEQ ID NO: 64032 - DNA, 22 bp, synthetic construct
  misc_feature 1..22: note = chemically synthesized
  source 1..22: mol_type = other DNA
tggaaataggtgtcaaccgcca

SEQ ID NO: 64033 - DNA, 22 bp, synthetic construct
  misc_feature 1..22: note = chemically synthesized
  source 1..22: mol_type = other DNA
ttatcccgtgatggtggaatag

SEQ ID NO: 64034 - DNA, 22 bp, synthetic construct
  misc_feature 1..22: note = chemically synthesized
  source 1..22: mol_type = other DNA
tatcccgtgatggtggaatagt

SEQ ID NO: 64035 - DNA, 22 bp, synthetic construct
  misc_feature 1..22: note = chemically synthesized
  source 1..22: mol_type = other DNA
atcccgtgatggtggaatagtg

SEQ ID NO: 64036 - DNA, 22 bp, synthetic construct
  misc_feature 1..22: note = chemically synthesized
  source 1..22: mol_type = other DNA
tcccgtgatggtggaatagtga

SEQ ID NO: 64037 - DNA, 22 bp, synthetic construct
  misc_feature 1..22: note = chemically synthesized
  source 1..22: mol_type = other DNA
ctcaccgaaatcagggagagcc

SEQ ID NO: 64038 - DNA, 22 bp, synthetic construct
  misc_feature 1..22: note = chemically synthesized
  source 1..22: mol_type = other DNA
tcaccgaaatcagggagagcca

SEQ ID NO: 64039 - DNA, 22 bp, synthetic construct
  misc_feature 1..22: note = chemically synthesized
  source 1..22: mol_type = other DNA
accgaaatcagggagagccact

SEQ ID NO: 64040 - DNA, 22 bp, synthetic construct
  misc_feature 1..22: note = chemically synthesized
  source 1..22: mol_type = other DNA
actctggcctctatcaacccag

SEQ ID NO: 64041 - DNA, 22 bp, synthetic construct
  misc_feature 1..22: note = chemically synthesized
  source 1..22: mol_type = other DNA
tggcctctatcaacccagagag

SEQ ID NO: 64042 - DNA, 22 bp, synthetic construct
  misc_feature 1..22: note = chemically synthesized
  source 1..22: mol_type = other DNA
gcctctatcaacccagagagat

SEQ ID NO: 64043 - DNA, 22 bp, synthetic construct
  misc_feature 1..22: note = chemically synthesized
  source 1..22: mol_type = other DNA
tatcaacccagagagattgcat

SEQ ID NO: 64044 - DNA, 22 bp, synthetic construct
  misc_feature 1..22: note = chemically synthesized
  source 1..22: mol_type = other DNA
tcaacccagagagattgcatgg

SEQ ID NO: 64045 - DNA, 22 bp, synthetic construct
  misc_feature 1..22: note = chemically synthesized
  source 1..22: mol_type = other DNA
catggttcttcaatggagatca

SEQ ID NO: 64046 - DNA, 22 bp, synthetic construct
  misc_feature 1..22: note = chemically synthesized
  source 1..22: mol_type = other DNA
ttcaatggagatcagatgtttg

SEQ ID NO: 64047 - DNA, 22 bp, synthetic construct
  misc_feature 1..22: note = chemically synthesized
  source 1..22: mol_type = other DNA
caatggagatcagatgtttgga

SEQ ID NO: 64048 - DNA, 22 bp, synthetic construct
  misc_feature 1..22: note = chemically synthesized
  source 1..22: mol_type = other DNA
aatggagatcagatgtttggaa

SEQ ID NO: 64049 - DNA, 22 bp, synthetic construct
  misc_feature 1..22: note = chemically synthesized
  source 1..22: mol_type = other DNA
ggaataacacttcatcttttta

SEQ ID NO: 64050 - DNA, 22 bp, synthetic construct
  misc_feature 1..22: note = chemically synthesized
  source 1..22: mol_type = other DNA
gaataacacttcatctttttat

SEQ ID NO: 64051 - DNA, 22 bp, synthetic construct
  misc_feature 1..22: note = chemically synthesized
  source 1..22: mol_type = other DNA
catctttttattttttagaatc

SEQ ID NO: 64052 - DNA, 22 bp, synthetic construct
  misc_feature 1..22: note = chemically synthesized
  source 1..22: mol_type = other DNA
atctttttattttttagaatca

SEQ ID NO: 64053 - DNA, 22 bp, synthetic construct
  misc_feature 1..22: note = chemically synthesized
  source 1..22: mol_type = other DNA
tttattttttagaatcatgcgg

SEQ ID NO: 64054 - DNA, 22 bp, synthetic construct
  misc_feature 1..22: note = chemically synthesized
  source 1..22: mol_type = other DNA
ttattttttagaatcatgcggc

SEQ ID NO: 64055 - DNA, 22 bp, synthetic construct
  misc_feature 1..22: note = chemically synthesized
  source 1..22: mol_type = other DNA
tattttttagaatcatgcggct

SEQ ID NO: 64056 - DNA, 22 bp, synthetic construct
  misc_feature 1..22: note = chemically synthesized
  source 1..22: mol_type = other DNA
attttttagaatcatgcggctg

SEQ ID NO: 64057 - DNA, 22 bp, synthetic construct
  misc_feature 1..22: note = chemically synthesized
  source 1..22: mol_type = other DNA
ttttttagaatcatgcggctgg

SEQ ID NO: 64058 - DNA, 22 bp, synthetic construct
  misc_feature 1..22: note = chemically synthesized
  source 1..22: mol_type = other DNA
tttagaatcatgcggctgggtg

SEQ ID NO: 64059 - DNA, 22 bp, synthetic construct
  misc_feature 1..22: note = chemically synthesized
  source 1..22: mol_type = other DNA
ttagaatcatgcggctgggtgt

SEQ ID NO: 64060 - DNA, 22 bp, synthetic construct
  misc_feature 1..22: note = chemically synthesized
  source 1..22: mol_type = other DNA
tagaatcatgcggctgggtgta

SEQ ID NO: 64061 - DNA, 22 bp, synthetic construct
  misc_feature 1..22: note = chemically synthesized
  source 1..22: mol_type = other DNA
agaatcatgcggctgggtgtag

SEQ ID NO: 64062 - DNA, 22 bp, synthetic construct
  misc_feature 1..22: note = chemically synthesized
  source 1..22: mol_type = other DNA
gaatcatgcggctgggtgtagt

SEQ ID NO: 64063 - DNA, 22 bp, synthetic construct
  misc_feature 1..22: note = chemically synthesized
  source 1..22: mol_type = other DNA
ggtgtagtggctcacgcctgta

SEQ ID NO: 64064 - DNA, 22 bp, synthetic construct
  misc_feature 1..22: note = chemically synthesized
  source 1..22: mol_type = other DNA
acgcctgtaatcctagcactta

SEQ ID NO: 64065 - DNA, 22 bp, synthetic construct
  misc_feature 1..22: note = chemically synthesized
  source 1..22: mol_type = other DNA
taatcctagcacttagggaggc

SEQ ID NO: 64066 - DNA, 22 bp, synthetic construct
  misc_feature 1..22: note = chemically synthesized
  source 1..22: mol_type = other DNA
gcacttagggaggccaaggcag

SEQ ID NO: 64067 - DNA, 22 bp, synthetic construct
  misc_feature 1..22: note = chemically synthesized
  source 1..22: mol_type = other DNA
agggaggccaaggcaggcagat

SEQ ID NO: 64068 - DNA, 22 bp, synthetic construct
  misc_feature 1..22: note = chemically synthesized
  source 1..22: mol_type = other DNA
gggaggccaaggcaggcagatc

SEQ ID NO: 64069 - DNA, 22 bp, synthetic construct
  misc_feature 1..22: note = chemically synthesized
  source 1..22: mol_type = other DNA
gagaccagcctagtcaacatag

SEQ ID NO: 64070 - DNA, 22 bp, synthetic construct
  misc_feature 1..22: note = chemically synthesized
  source 1..22: mol_type = other DNA
gtcaacatagtgaaaccatgtc

SEQ ID NO: 64071 - DNA, 22 bp, synthetic construct
  misc_feature 1..22: note = chemically synthesized
  source 1..22: mol_type = other DNA
tactaaaaatacaaaaaaaatt

SEQ ID NO: 64072 - DNA, 22 bp, synthetic construct
  misc_feature 1..22: note = chemically synthesized
  source 1..22: mol_type = other DNA
ctaaaaatacaaaaaaaattag

SEQ ID NO: 64073 - DNA, 22 bp, synthetic construct
  misc_feature 1..22: note = chemically synthesized
  source 1..22: mol_type = other DNA
aaaatacaaaaaaaattagctg

SEQ ID NO: 64074 - DNA, 22 bp, synthetic construct
  misc_feature 1..22: note = chemically synthesized
  source 1..22: mol_type = other DNA
gctgggcatggtggcgggcacc

SEQ ID NO: 64075 - DNA, 22 bp, synthetic construct
  misc_feature 1..22: note = chemically synthesized
  source 1..22: mol_type = other DNA
ggcatggtggcgggcacctgta

SEQ ID NO: 64076 - DNA, 22 bp, synthetic construct
  misc_feature 1..22: note = chemically synthesized
  source 1..22: mol_type = other DNA
taatcccagctacttgggaggc

SEQ ID NO: 64077 - DNA, 22 bp, synthetic construct
  misc_feature 1..22: note = chemically synthesized
  source 1..22: mol_type = other DNA
cttgggaggctgaggcaggaga

SEQ ID NO: 64078 - DNA, 22 bp, synthetic construct
  misc_feature 1..22: note = chemically synthesized
  source 1..22: mol_type = other DNA
gggaggctgaggcaggagaatc

SEQ ID NO: 64079 - DNA, 22 bp, synthetic construct
  misc_feature 1..22: note = chemically synthesized
  source 1..22: mol_type = other DNA
ggaggctgaggcaggagaatca

SEQ ID NO: 64080 - DNA, 22 bp, synthetic construct
  misc_feature 1..22: note = chemically synthesized
  source 1..22: mol_type = other DNA
aggcaggagaatcacttgaacc

SEQ ID NO: 64081 - DNA, 22 bp, synthetic construct
  misc_feature 1..22: note = chemically synthesized
  source 1..22: mol_type = other DNA
gaaccggagaggcagaggttgc

SEQ ID NO: 64082 - DNA, 22 bp, synthetic construct
  misc_feature 1..22: note = chemically synthesized
  source 1..22: mol_type = other DNA
aaccggagaggcagaggttgca

SEQ ID NO: 64083 - DNA, 22 bp, synthetic construct
  misc_feature 1..22: note = chemically synthesized
  source 1..22: mol_type = other DNA
cagtgagctgagattgcaccat

SEQ ID NO: 64084 - DNA, 22 bp, synthetic construct
  misc_feature 1..22: note = chemically synthesized
  source 1..22: mol_type = other DNA
agattgcaccattgcactccag

SEQ ID NO: 64085 - DNA, 22 bp, synthetic construct
  misc_feature 1..22: note = chemically synthesized
  source 1..22: mol_type = other DNA
caccattgcactccagccaggc

SEQ ID NO: 64086 - DNA, 22 bp, synthetic construct
  misc_feature 1..22: note = chemically synthesized
  source 1..22: mol_type = other DNA
cactccagccaggcaacagtgc

SEQ ID NO: 64087 - DNA, 22 bp, synthetic construct
  misc_feature 1..22: note = chemically synthesized
  source 1..22: mol_type = other DNA
cagccaggcaacagtgcgagac

SEQ ID NO: 64088 - DNA, 22 bp, synthetic construct
  misc_feature 1..22: note = chemically synthesized
  source 1..22: mol_type = other DNA
catctcaaacaaacaaacaaaa

SEQ ID NO: 64089 - DNA, 22 bp, synthetic construct
  misc_feature 1..22: note = chemically synthesized
  source 1..22: mol_type = other DNA
aaacaaacaaacaaaagaaaga

SEQ ID NO: 64090 - DNA, 22 bp, synthetic construct
  misc_feature 1..22: note = chemically synthesized
  source 1..22: mol_type = other DNA
acgtgatagaaattggcaaatg

SEQ ID NO: 64091 - DNA, 22 bp, synthetic construct
  misc_feature 1..22: note = chemically synthesized
  source 1..22: mol_type = other DNA
cgtgatagaaattggcaaatgc

SEQ ID NO: 64092 - DNA, 22 bp, synthetic construct
  misc_feature 1..22: note = chemically synthesized
  source 1..22: mol_type = other DNA
gcaaatgctaaactcagggctt

SEQ ID NO: 64093 - DNA, 22 bp, synthetic construct
  misc_feature 1..22: note = chemically synthesized
  source 1..22: mol_type = other DNA
aactcagggctttcccctgctc

SEQ ID NO: 64094 - DNA, 22 bp, synthetic construct
  misc_feature 1..22: note = chemically synthesized
  source 1..22: mol_type = other DNA
agggctttcccctgctccccag

SEQ ID NO: 64095 - DNA, 22 bp, synthetic construct
  misc_feature 1..22: note = chemically synthesized
  source 1..22: mol_type = other DNA
tcccctgctccccagagagtca

SEQ ID NO: 64096 - DNA, 22 bp, synthetic construct
  misc_feature 1..22: note = chemically synthesized
  source 1..22: mol_type = other DNA
cccctgctccccagagagtcag

SEQ ID NO: 64097 - DNA, 22 bp, synthetic construct
  misc_feature 1..22: note = chemically synthesized
  source 1..22: mol_type = other DNA
ccctgctccccagagagtcagt

SEQ ID NO: 64098 - DNA, 22 bp, synthetic construct
  misc_feature 1..22: note = chemically synthesized
  source 1..22: mol_type = other DNA
ctccccagagagtcagtttatc

SEQ ID NO: 64099 - DNA, 22 bp, synthetic construct
  misc_feature 1..22: note = chemically synthesized
  source 1..22: mol_type = other DNA
cccagagagtcagtttatcagc

SEQ ID NO: 64100 - DNA, 22 bp, synthetic construct
  misc_feature 1..22: note = chemically synthesized
  source 1..22: mol_type = other DNA
atcagcactggacgtaacatag

SEQ ID NO: 64101 - DNA, 22 bp, synthetic construct
  misc_feature 1..22: note = chemically synthesized
  source 1..22: mol_type = other DNA
tcagcactggacgtaacatagt

SEQ ID NO: 64102 - DNA, 22 bp, synthetic construct
  misc_feature 1..22: note = chemically synthesized
  source 1..22: mol_type = other DNA
gacgtaacatagttcataagag

SEQ ID NO: 64103 - DNA, 22 bp, synthetic construct
  misc_feature 1..22: note = chemically synthesized
  source 1..22: mol_type = other DNA
ataagagcattgccgcggaagc

SEQ ID NO: 64104 - DNA, 22 bp, synthetic construct
  misc_feature 1..22: note = chemically synthesized
  source 1..22: mol_type = other DNA
ccgcggaagccagcctgcctac

SEQ ID NO: 64105 - DNA, 22 bp, synthetic construct
  misc_feature 1..22: note = chemically synthesized
  source 1..22: mol_type = other DNA
cctacctgggcttccatcctgg

SEQ ID NO: 64106 - DNA, 22 bp, synthetic construct
  misc_feature 1..22: note = chemically synthesized
  source 1..22: mol_type = other DNA
cctgggcttccatcctggctcg

SEQ ID NO: 64107 - DNA, 22 bp, synthetic construct
  misc_feature 1..22: note = chemically synthesized
  source 1..22: mol_type = other DNA
ggcttccatcctggctcggcat

SEQ ID NO: 64108 - DNA, 22 bp, synthetic construct
  misc_feature 1..22: note = chemically synthesized
  source 1..22: mol_type = other DNA
ccatcctggctcggcatgtact

SEQ ID NO: 64109 - DNA, 22 bp, synthetic construct
  misc_feature 1..22: note = chemically synthesized
  source 1..22: mol_type = other DNA
catcctggctcggcatgtacta

SEQ ID NO: 64110 - DNA, 22 bp, synthetic construct
  misc_feature 1..22: note = chemically synthesized
  source 1..22: mol_type = other DNA
gctcggcatgtactaaccttgt

SEQ ID NO: 64111 - DNA, 22 bp, synthetic construct
  misc_feature 1..22: note = chemically synthesized
  source 1..22: mol_type = other DNA
ggcatgtactaaccttgttggc

SEQ ID NO: 64112 - DNA, 22 bp, synthetic construct
  misc_feature 1..22: note = chemically synthesized
  source 1..22: mol_type = other DNA
accttgttggcctaatcattta

SEQ ID NO: 64113 - DNA, 22 bp, synthetic construct
  misc_feature 1..22: note = chemically synthesized
  source 1..22: mol_type = other DNA
gttggcctaatcatttaactca

SEQ ID NO: 64114 - DNA, 22 bp, synthetic construct
  misc_feature 1..22: note = chemically synthesized
  source 1..22: mol_type = other DNA
ttggcctaatcatttaactcag

SEQ ID NO: 64115 - DNA, 22 bp, synthetic construct
  misc_feature 1..22: note = chemically synthesized
  source 1..22: mol_type = other DNA
gcctaatcatttaactcagcac

SEQ ID NO: 64116 - DNA, 22 bp, synthetic construct
  misc_feature 1..22: note = chemically synthesized
  source 1..22: mol_type = other DNA
atcatttaactcagcaccttgg

SEQ ID NO: 64117 - DNA, 22 bp, synthetic construct
  misc_feature 1..22: note = chemically synthesized
  source 1..22: mol_type = other DNA
aactcagcaccttggtctctgc

SEQ ID NO: 64118 - DNA, 22 bp, synthetic construct
  misc_feature 1..22: note = chemically synthesized
  source 1..22: mol_type = other DNA
actcagcaccttggtctctgca

SEQ ID NO: 64119 - DNA, 22 bp, synthetic construct
  misc_feature 1..22: note = chemically synthesized
  source 1..22: mol_type = other DNA
agcaccttggtctctgcatcta

SEQ ID NO: 64120 - DNA, 22 bp, synthetic construct
  misc_feature 1..22: note = chemically synthesized
  source 1..22: mol_type = other DNA
ggtctctgcatctactgtttct

SEQ ID NO: 64121 - DNA, 22 bp, synthetic construct
  misc_feature 1..22: note = chemically synthesized
  source 1..22: mol_type = other DNA
gtctctgcatctactgtttctg

SEQ ID NO: 64122 - DNA, 22 bp, synthetic construct
  misc_feature 1..22: note = chemically synthesized
  source 1..22: mol_type = other DNA
tgcatctactgtttctgtaaat

SEQ ID NO: 64123 - DNA, 22 bp, synthetic construct
  misc_feature 1..22: note = chemically synthesized
  source 1..22: mol_type = other DNA
catctactgtttctgtaaatag

SEQ ID NO: 64124 - DNA, 22 bp, synthetic construct
  misc_feature 1..22: note = chemically synthesized
  source 1..22: mol_type = other DNA
ctgtttctgtaaatagcagtaa

SEQ ID NO: 64125 - DNA, 22 bp, synthetic construct
  misc_feature 1..22: note = chemically synthesized
  source 1..22: mol_type = other DNA
tttctgtaaatagcagtaacta

SEQ ID NO: 64126 - DNA, 22 bp, synthetic construct
  misc_feature 1..22: note = chemically synthesized
  source 1..22: mol_type = other DNA
ctgtaaatagcagtaactacct

SEQ ID NO: 64127 - DNA, 22 bp, synthetic construct
  misc_feature 1..22: note = chemically synthesized
  source 1..22: mol_type = other DNA
tgtaaatagcagtaactacctc

SEQ ID NO: 64128 - DNA, 22 bp, synthetic construct
  misc_feature 1..22: note = chemically synthesized
  source 1..22: mol_type = other DNA
taaatagcagtaactacctcac

SEQ ID NO: 64129 - DNA, 22 bp, synthetic construct
  misc_feature 1..22: note = chemically synthesized
  source 1..22: mol_type = other DNA
cctcacagaaaagcacatagca

SEQ ID NO: 64130 - DNA, 22 bp, synthetic construct
  misc_feature 1..22: note = chemically synthesized
  source 1..22: mol_type = other DNA
acagaaaagcacatagcacatg

SEQ ID NO: 64131 - DNA, 22 bp, synthetic construct
  misc_feature 1..22: note = chemically synthesized
  source 1..22: mol_type = other DNA
gcacacactgtttaataaatgt

SEQ ID NO: 64132 - DNA, 22 bp, synthetic construct
  misc_feature 1..22: note = chemically synthesized
  source 1..22: mol_type = other DNA
tttaataaatgttaaccctgat

SEQ ID NO: 64133 - DNA, 22 bp, synthetic construct
  misc_feature 1..22: note = chemically synthesized
  source 1..22: mol_type = other DNA
aataaatgttaaccctgattat

SEQ ID NO: 64134 - DNA, 22 bp, synthetic construct
  misc_feature 1..22: note = chemically synthesized
  source 1..22: mol_type = other DNA
ataaatgttaaccctgattatt

SEQ ID NO: 64135 - DNA, 22 bp, synthetic construct
  misc_feature 1..22: note = chemically synthesized
  source 1..22: mol_type = other DNA
accctgattattattaagctgc

SEQ ID NO: 64136 - DNA, 22 bp, synthetic construct
  misc_feature 1..22: note = chemically synthesized
  source 1..22: mol_type = other DNA
attattattaagctgccagaga

SEQ ID NO: 64137 - DNA, 22 bp, synthetic construct
  misc_feature 1..22: note = chemically synthesized
  source 1..22: mol_type = other DNA
ttattaagctgccagagataac

SEQ ID NO: 64138 - DNA, 22 bp, synthetic construct
  misc_feature 1..22: note = chemically synthesized
  source 1..22: mol_type = other DNA
ttaagctgccagagataaccta

SEQ ID NO: 64139 - DNA, 22 bp, synthetic construct
  misc_feature 1..22: note = chemically synthesized
  source 1..22: mol_type = other DNA
agctgccagagataacctattt

SEQ ID NO: 64140 - DNA, 22 bp, synthetic construct
  misc_feature 1..22: note = chemically synthesized
  source 1..22: mol_type = other DNA
ccagagataacctatttgtaga

SEQ ID NO: 64141 - DNA, 22 bp, synthetic construct
  misc_feature 1..22: note = chemically synthesized
  source 1..22: mol_type = other DNA
tttgtagattataaaacagaaa

SEQ ID NO: 64142 - DNA, 22 bp, synthetic construct
  misc_feature 1..22: note = chemically synthesized
  source 1..22: mol_type = other DNA
gtagattataaaacagaaactc

SEQ ID NO: 64143 - DNA, 22 bp, synthetic construct
  misc_feature 1..22: note = chemically synthesized
  source 1..22: mol_type = other DNA
tagattataaaacagaaactca

SEQ ID NO: 64144 - DNA, 22 bp, synthetic construct
  misc_feature 1..22: note = chemically synthesized
  source 1..22: mol_type = other DNA
taaaacagaaactcagataatt

SEQ ID NO: 64145 - DNA, 22 bp, synthetic construct
  misc_feature 1..22: note = chemically synthesized
  source 1..22: mol_type = other DNA
agataattgatatgacttgcca

SEQ ID NO: 64146 - DNA, 22 bp, synthetic construct
  misc_feature 1..22: note = chemically synthesized
  source 1..22: mol_type = other DNA
atatgacttgccaaggacatgt

SEQ ID NO: 64147 - DNA, 22 bp, synthetic construct
  misc_feature 1..22: note = chemically synthesized
  source 1..22: mol_type = other DNA
gccaaggacatgtagttggtgg

SEQ ID NO: 64148 - DNA, 22 bp, synthetic construct
  misc_feature 1..22: note = chemically synthesized
  source 1..22: mol_type = other DNA
ccaaggacatgtagttggtggg

SEQ ID NO: 64149 - DNA, 22 bp, synthetic construct
  misc_feature 1..22: note = chemically synthesized
  source 1..22: mol_type = other DNA
gtgggtggcagaacgagggctg

SEQ ID NO: 64150 - DNA, 22 bp, synthetic construct
  misc_feature 1..22: note = chemically synthesized
  source 1..22: mol_type = other DNA
gagcccagttcccagggtgact

SEQ ID NO: 64151 - DNA, 22 bp, synthetic construct
  misc_feature 1..22: note = chemically synthesized
  source 1..22: mol_type = other DNA
ccagggtgacttttcattaccc

SEQ ID NO: 64152 - DNA, 22 bp, synthetic construct
  misc_feature 1..22: note = chemically synthesized
  source 1..22: mol_type = other DNA
ttcattaccccacaaaacaggc

SEQ ID NO: 64153 - DNA, 22 bp, synthetic construct
  misc_feature 1..22: note = chemically synthesized
  source 1..22: mol_type = other DNA
tcattaccccacaaaacaggct

SEQ ID NO: 64154 - DNA, 22 bp, synthetic construct
  misc_feature 1..22: note = chemically synthesized
  source 1..22: mol_type = other DNA
cattaccccacaaaacaggctg

SEQ ID NO: 64155 - DNA, 22 bp, synthetic construct
  misc_feature 1..22: note = chemically synthesized
  source 1..22: mol_type = other DNA
attaccccacaaaacaggctgt

SEQ ID NO: 64156 - DNA, 22 bp, synthetic construct
  misc_feature 1..22: note = chemically synthesized
  source 1..22: mol_type = other DNA
ccccacaaaacaggctgttgaa

SEQ ID NO: 64157 - DNA, 22 bp, synthetic construct
  misc_feature 1..22: note = chemically synthesized
  source 1..22: mol_type = other DNA
ttgaatcatctgtgtgtttcct

SEQ ID NO: 64158 - DNA, 22 bp, synthetic construct
  misc_feature 1..22: note = chemically synthesized
  source 1..22: mol_type = other DNA
aatcatctgtgtgtttcctttt

SEQ ID NO: 64159 - DNA, 22 bp, synthetic construct
  misc_feature 1..22: note = chemically synthesized
  source 1..22: mol_type = other DNA
tgtgtttccttttttcatacag

SEQ ID NO: 64160 - DNA, 22 bp, synthetic construct
  misc_feature 1..22: note = chemically synthesized
  source 1..22: mol_type = other DNA
ccttttttcatacagcatacat

SEQ ID NO: 64161 - DNA, 22 bp, synthetic construct
  misc_feature 1..22: note = chemically synthesized
  source 1..22: mol_type = other DNA
cttttttcatacagcatacatc

SEQ ID NO: 64162 - DNA, 22 bp, synthetic construct
  misc_feature 1..22: note = chemically synthesized
  source 1..22: mol_type = other DNA
ttttcatacagcatacatcatc

SEQ ID NO: 64163 - DNA, 22 bp, synthetic construct
  misc_feature 1..22: note = chemically synthesized
  source 1..22: mol_type = other DNA
tttcatacagcatacatcatct

SEQ ID NO: 64164 - DNA, 22 bp, synthetic construct
  misc_feature 1..22: note = chemically synthesized
  source 1..22: mol_type = other DNA
ttcatacagcatacatcatcta

SEQ ID NO: 64165 - DNA, 22 bp, synthetic construct
  misc_feature 1..22: note = chemically synthesized
  source 1..22: mol_type = other DNA
tcatacagcatacatcatctat

SEQ ID NO: 64166 - DNA, 22 bp, synthetic construct
  misc_feature 1..22: note = chemically synthesized
  source 1..22: mol_type = other DNA
catacagcatacatcatctatc

SEQ ID NO: 64167 - DNA, 22 bp, synthetic construct
  misc_feature 1..22: note = chemically synthesized
  source 1..22: mol_type = other DNA
atacagcatacatcatctatct

SEQ ID NO: 64168 - DNA, 22 bp, synthetic construct
  misc_feature 1..22: note = chemically synthesized
  source 1..22: mol_type = other DNA
tcttttttttttttttgagaca

SEQ ID NO: 64169 - DNA, 22 bp, synthetic construct
  misc_feature 1..22: note = chemically synthesized
  source 1..22: mol_type = other DNA
ttttttttttttgagacagggt

SEQ ID NO: 64170 - DNA, 22 bp, synthetic construct
  misc_feature 1..22: note = chemically synthesized
  source 1..22: mol_type = other DNA
tttttttttttgagacagggtc

SEQ ID NO: 64171 - DNA, 22 bp, synthetic construct
  misc_feature 1..22: note = chemically synthesized
  source 1..22: mol_type = other DNA
ttttttttttgagacagggtct

SEQ ID NO: 64172 - DNA, 22 bp, synthetic construct
  misc_feature 1..22: note = chemically synthesized
  source 1..22: mol_type = other DNA
tttttttttgagacagggtctt

SEQ ID NO: 64173 - DNA, 22 bp, synthetic construct
  misc_feature 1..22: note = chemically synthesized
  source 1..22: mol_type = other DNA
ttttttttgagacagggtctta

SEQ ID NO: 64174 - DNA, 22 bp, synthetic construct
  misc_feature 1..22: note = chemically synthesized
  source 1..22: mol_type = other DNA
tttttttgagacagggtcttac

SEQ ID NO: 64175 - DNA, 22 bp, synthetic construct
  misc_feature 1..22: note = chemically synthesized
  source 1..22: mol_type = other DNA
ttttttgagacagggtcttact

SEQ ID NO: 64176 - DNA, 22 bp, synthetic construct
  misc_feature 1..22: note = chemically synthesized
  source 1..22: mol_type = other DNA
tttttgagacagggtcttactc

SEQ ID NO: 64177 - DNA, 22 bp, synthetic construct
  misc_feature 1..22: note = chemically synthesized
  source 1..22: mol_type = other DNA
ttttgagacagggtcttactct

SEQ ID NO: 64178 - DNA, 22 bp, synthetic construct
  misc_feature 1..22: note = chemically synthesized
  source 1..22: mol_type = other DNA
tttgagacagggtcttactctg

SEQ ID NO: 64179 - DNA, 22 bp, synthetic construct
  misc_feature 1..22: note = chemically synthesized
  source 1..22: mol_type = other DNA
ttgagacagggtcttactctgt

SEQ ID NO: 64180 - DNA, 22 bp, synthetic construct
  misc_feature 1..22: note = chemically synthesized
  source 1..22: mol_type = other DNA
tgagacagggtcttactctgtt

SEQ ID NO: 64181 - DNA, 22 bp, synthetic construct
  misc_feature 1..22: note = chemically synthesized
  source 1..22: mol_type = other DNA
gagacagggtcttactctgttg

SEQ ID NO: 64182 - DNA, 22 bp, synthetic construct
  misc_feature 1..22: note = chemically synthesized
  source 1..22: mol_type = other DNA
agacagggtcttactctgttgc

SEQ ID NO: 64183 - DNA, 22 bp, synthetic construct
  misc_feature 1..22: note = chemically synthesized
  source 1..22: mol_type = other DNA
actctgttgcccaggctggagt

SEQ ID NO: 64184 - DNA, 22 bp, synthetic construct
  misc_feature 1..22: note = chemically synthesized
  source 1..22: mol_type = other DNA
ctctgttgcccaggctggagtg

SEQ ID NO: 64185 - DNA, 22 bp, synthetic construct
  misc_feature 1..22: note = chemically synthesized
  source 1..22: mol_type = other DNA
tgttgcccaggctggagtgcag

SEQ ID NO: 64186 - DNA, 22 bp, synthetic construct
  misc_feature 1..22: note = chemically synthesized
  source 1..22: mol_type = other DNA
ttgcccaggctggagtgcagtg

SEQ ID NO: 64187 - DNA, 22 bp, synthetic construct
  misc_feature 1..22: note = chemically synthesized
  source 1..22: mol_type = other DNA
cccaggctggagtgcagtggca

SEQ ID NO: 64188 - DNA, 22 bp, synthetic construct
  misc_feature 1..22: note = chemically synthesized
  source 1..22: mol_type = other DNA
gagtgcagtggcatgatcttga

SEQ ID NO: 64189 - DNA, 22 bp, synthetic construct
  misc_feature 1..22: note = chemically synthesized
  source 1..22: mol_type = other DNA
gactcactgcaacctcctccgc

SEQ ID NO: 64190 - DNA, 22 bp, synthetic construct
  misc_feature 1..22: note = chemically synthesized
  source 1..22: mol_type = other DNA
actcactgcaacctcctccgcc

SEQ ID NO: 64191 - DNA, 22 bp, synthetic construct
  misc_feature 1..22: note = chemically synthesized
  source 1..22: mol_type = other DNA
actgcaacctcctccgcctctc

SEQ ID NO: 64192 - DNA, 22 bp, synthetic construct
  misc_feature 1..22: note = chemically synthesized
  source 1..22: mol_type = other DNA
caacctcctccgcctctcacct

SEQ ID NO: 64193 - DNA, 22 bp, synthetic construct
  misc_feature 1..22: note = chemically synthesized
  source 1..22: mol_type = other DNA
ctccgcctctcacctcagcctc

SEQ ID NO: 64194 - DNA, 22 bp, synthetic construct
  misc_feature 1..22: note = chemically synthesized
  source 1..22: mol_type = other DNA
cgcctctcacctcagcctcctg

SEQ ID NO: 64195 - DNA, 22 bp, synthetic construct
  misc_feature 1..22: note = chemically synthesized
  source 1..22: mol_type = other DNA
tcacctcagcctcctgagtagc

SEQ ID NO: 64196 - DNA, 22 bp, synthetic construct
  misc_feature 1..22: note = chemically synthesized
  source 1..22: mol_type = other DNA
acctcagcctcctgagtagctg

SEQ ID NO: 64197 - DNA, 22 bp, synthetic construct
  misc_feature 1..22: note = chemically synthesized
  source 1..22: mol_type = other DNA
agcctcctgagtagctgggact

SEQ ID NO: 64198 - DNA, 22 bp, synthetic construct
  misc_feature 1..22: note = chemically synthesized
  source 1..22: mol_type = other DNA
ctgagtagctgggactacagca

SEQ ID NO: 64199 - DNA, 22 bp, synthetic construct
  misc_feature 1..22: note = chemically synthesized
  source 1..22: mol_type = other DNA
agtagctgggactacagcacca

SEQ ID NO: 64200 - DNA, 22 bp, synthetic construct
  misc_feature 1..22: note = chemically synthesized
  source 1..22: mol_type = other DNA
ggactacagcaccaacacgccc

SEQ ID NO: 64201 - DNA, 22 bp, synthetic construct
  misc_feature 1..22: note = chemically synthesized
  source 1..22: mol_type = other DNA
cagcaccaacacgcccagctaa

SEQ ID NO: 64202 - DNA, 22 bp, synthetic construct
  misc_feature 1..22: note = chemically synthesized
  source 1..22: mol_type = other DNA
attttcgtaatgtttttgtaga

SEQ ID NO: 64203 - DNA, 22 bp, synthetic construct
  misc_feature 1..22: note = chemically synthesized
  source 1..22: mol_type = other DNA
tcgtaatgtttttgtagagatg

SEQ ID NO: 64204 - DNA, 22 bp, synthetic construct
  misc_feature 1..22: note = chemically synthesized
  source 1..22: mol_type = other DNA
cgtaatgtttttgtagagatgg

SEQ ID NO: 64205 - DNA, 22 bp, synthetic construct
  misc_feature 1..22: note = chemically synthesized
  source 1..22: mol_type = other DNA
gtaatgtttttgtagagatgga

SEQ ID NO: 64206 - DNA, 22 bp, synthetic construct
  misc_feature 1..22: note = chemically synthesized
  source 1..22: mol_type = other DNA
ttgtagagatggagtttcgcca

SEQ ID NO: 64207 - DNA, 22 bp, synthetic construct
  misc_feature 1..22: note = chemically synthesized
  source 1..22: mol_type = other DNA
tgtagagatggagtttcgccat

SEQ ID NO: 64208 - DNA, 22 bp, synthetic construct
  misc_feature 1..22: note = chemically synthesized
  source 1..22: mol_type = other DNA
gtagagatggagtttcgccatg

SEQ ID NO: 64209 - DNA, 22 bp, synthetic construct
  misc_feature 1..22: note = chemically synthesized
  source 1..22: mol_type = other DNA
tagagatggagtttcgccatgt

SEQ ID NO: 64210 - DNA, 22 bp, synthetic construct
  misc_feature 1..22: note = chemically synthesized
  source 1..22: mol_type = other DNA
cgccatgttgcccaggctggtc

SEQ ID NO: 64211 - DNA, 22 bp, synthetic construct
  misc_feature 1..22: note = chemically synthesized
  source 1..22: mol_type = other DNA
gccatgttgcccaggctggtct

SEQ ID NO: 64212 - DNA, 22 bp, synthetic construct
  misc_feature 1..22: note = chemically synthesized
  source 1..22: mol_type = other DNA
cccaggctggtcttgaactcct

SEQ ID NO: 64213 - DNA, 22 bp, synthetic construct
  misc_feature 1..22: note = chemically synthesized
  source 1..22: mol_type = other DNA
gtcttgaactcctgagttcacc

SEQ ID NO: 64214 - DNA, 22 bp, synthetic construct
  misc_feature 1..22: note = chemically synthesized
  source 1..22: mol_type = other DNA
gaactcctgagttcacccagga

SEQ ID NO: 64215 - DNA, 22 bp, synthetic construct
  misc_feature 1..22: note = chemically synthesized
  source 1..22: mol_type = other DNA
aactcctgagttcacccaggag

SEQ ID NO: 64216 - DNA, 22 bp, synthetic construct
  misc_feature 1..22: note = chemically synthesized
  source 1..22: mol_type = other DNA
ctgagttcacccaggagtgatt

SEQ ID NO: 64217 - DNA, 22 bp, synthetic construct
  misc_feature 1..22: note = chemically synthesized
  source 1..22: mol_type = other DNA
agttcacccaggagtgattcgc

SEQ ID NO: 64218 - DNA, 22 bp, synthetic construct
  misc_feature 1..22: note = chemically synthesized
  source 1..22: mol_type = other DNA
acccaggagtgattcgcccacc

SEQ ID NO: 64219 - DNA, 22 bp, synthetic construct
  misc_feature 1..22: note = chemically synthesized
  source 1..22: mol_type = other DNA
gcccacctcggcctcccaaagt

SEQ ID NO: 64220 - DNA, 22 bp, synthetic construct
  misc_feature 1..22: note = chemically synthesized
  source 1..22: mol_type = other DNA
ggcctcccaaagtgctgggatt

SEQ ID NO: 64221 - DNA, 22 bp, synthetic construct
  misc_feature 1..22: note = chemically synthesized
  source 1..22: mol_type = other DNA
ccaaagtgctgggattacaggt

SEQ ID NO: 64222 - DNA, 22 bp, synthetic construct
  misc_feature 1..22: note = chemically synthesized
  source 1..22: mol_type = other DNA
ggattacaggtgtgagccacca

SEQ ID NO: 64223 - DNA, 22 bp, synthetic construct
  misc_feature 1..22: note = chemically synthesized
  source 1..22: mol_type = other DNA
caggtgtgagccaccatgcctg

SEQ ID NO: 64224 - DNA, 22 bp, synthetic construct
  misc_feature 1..22: note = chemically synthesized
  source 1..22: mol_type = other DNA
gccccatacatctttctttatg

SEQ ID NO: 64225 - DNA, 22 bp, synthetic construct
  misc_feature 1..22: note = chemically synthesized
  source 1..22: mol_type = other DNA
tctttatgttacctcttctgct

SEQ ID NO: 64226 - DNA, 22 bp, synthetic construct
  misc_feature 1..22: note = chemically synthesized
  source 1..22: mol_type = other DNA
ctttatgttacctcttctgctt

SEQ ID NO: 64227 - DNA, 22 bp, synthetic construct
  misc_feature 1..22: note = chemically synthesized
  source 1..22: mol_type = other DNA
tttatgttacctcttctgcttc

SEQ ID NO: 64228 - DNA, 22 bp, synthetic construct
  misc_feature 1..22: note = chemically synthesized
  source 1..22: mol_type = other DNA
tatgttacctcttctgcttcat

SEQ ID NO: 64229 - DNA, 22 bp, synthetic construct
  misc_feature 1..22: note = chemically synthesized
  source 1..22: mol_type = other DNA
atgttacctcttctgcttcata

SEQ ID NO: 64230 - DNA, 22 bp, synthetic construct
  misc_feature 1..22: note = chemically synthesized
  source 1..22: mol_type = other DNA
tgttacctcttctgcttcatac

SEQ ID NO: 64231 - DNA, 22 bp, synthetic construct
  misc_feature 1..22: note = chemically synthesized
  source 1..22: mol_type = other DNA
cctcttctgcttcatactaata

SEQ ID NO: 64232 - DNA, 22 bp, synthetic construct
  misc_feature 1..22: note = chemically synthesized
  source 1..22: mol_type = other DNA
ttctgcttcatactaataaaac

SEQ ID NO: 64233 - DNA, 22 bp, synthetic construct
  misc_feature 1..22: note = chemically synthesized
  source 1..22: mol_type = other DNA
ctgcttcatactaataaaactc

SEQ ID NO: 64234 - DNA, 22 bp, synthetic construct
  misc_feature 1..22: note = chemically synthesized
  source 1..22: mol_type = other DNA
tgcttcatactaataaaactct

SEQ ID NO: 64235 - DNA, 22 bp, synthetic construct
  misc_feature 1..22: note = chemically synthesized
  source 1..22: mol_type = other DNA
cttcatactaataaaactcttt

SEQ ID NO: 64236 - DNA, 22 bp, synthetic construct
  misc_feature 1..22: note = chemically synthesized
  source 1..22: mol_type = other DNA
catactaataaaactctttgct

SEQ ID NO: 64237 - DNA, 22 bp, synthetic construct
  misc_feature 1..22: note = chemically synthesized
  source 1..22: mol_type = other DNA
atactaataaaactctttgctc

SEQ ID NO: 64238 - DNA, 22 bp, synthetic construct
  misc_feature 1..22: note = chemically synthesized
  source 1..22: mol_type = other DNA
ataaaactctttgctcaaagcc

SEQ ID NO: 64239 - DNA, 22 bp, synthetic construct
  misc_feature 1..22: note = chemically synthesized
  source 1..22: mol_type = other DNA
tttgctcaaagcctatataact

SEQ ID NO: 64240 - DNA, 22 bp, synthetic construct
  misc_feature 1..22: note = chemically synthesized
  source 1..22: mol_type = other DNA
tgctcaaagcctatataactca

SEQ ID NO: 64241 - DNA, 22 bp, synthetic construct
  misc_feature 1..22: note = chemically synthesized
  source 1..22: mol_type = other DNA
gctcaaagcctatataactcag

SEQ ID NO: 64242 - DNA, 22 bp, synthetic construct
  misc_feature 1..22: note = chemically synthesized
  source 1..22: mol_type = other DNA
ctcaaagcctatataactcaga

SEQ ID NO: 64243 - DNA, 22 bp, synthetic construct
  misc_feature 1..22: note = chemically synthesized
  source 1..22: mol_type = other DNA
aaagcctatataactcagactt

SEQ ID NO: 64244 - DNA, 22 bp, synthetic construct
  misc_feature 1..22: note = chemically synthesized
  source 1..22: mol_type = other DNA
tataactcagacttttcacgaa

SEQ ID NO: 64245 - DNA, 22 bp, synthetic construct
  misc_feature 1..22: note = chemically synthesized
  source 1..22: mol_type = other DNA
agacttttcacgaaattcaact

SEQ ID NO: 64246 - DNA, 22 bp, synthetic construct
  misc_feature 1..22: note = chemically synthesized
  source 1..22: mol_type = other DNA
ttcacgaaattcaactgtccta

SEQ ID NO: 64247 - DNA, 22 bp, synthetic construct
  misc_feature 1..22: note = chemically synthesized
  source 1..22: mol_type = other DNA
tcacgaaattcaactgtcctac

SEQ ID NO: 64248 - DNA, 22 bp, synthetic construct
  misc_feature 1..22: note = chemically synthesized
  source 1..22: mol_type = other DNA
cacgaaattcaactgtcctacc

SEQ ID NO: 64249 - DNA, 22 bp, synthetic construct
  misc_feature 1..22: note = chemically synthesized
  source 1..22: mol_type = other DNA
acgaaattcaactgtcctaccc

SEQ ID NO: 64250 - DNA, 22 bp, synthetic construct
  misc_feature 1..22: note = chemically synthesized
  source 1..22: mol_type = other DNA
aactgtcctaccctttaaccca

SEQ ID NO: 64251 - DNA, 22 bp, synthetic construct
  misc_feature 1..22: note = chemically synthesized
  source 1..22: mol_type = other DNA
tcctaccctttaacccatatga

SEQ ID NO: 64252 - DNA, 22 bp, synthetic construct
  misc_feature 1..22: note = chemically synthesized
  source 1..22: mol_type = other DNA
ccctttaacccatatgaaatag

SEQ ID NO: 64253 - DNA, 22 bp, synthetic construct
  misc_feature 1..22: note = chemically synthesized
  source 1..22: mol_type = other DNA
taacccatatgaaataggcttt

SEQ ID NO: 64254 - DNA, 22 bp, synthetic construct
  misc_feature 1..22: note = chemically synthesized
  source 1..22: mol_type = other DNA
aacccatatgaaataggctttc

SEQ ID NO: 64255 - DNA, 22 bp, synthetic construct
  misc_feature 1..22: note = chemically synthesized
  source 1..22: mol_type = other DNA
acccatatgaaataggctttcc

SEQ ID NO: 64256 - DNA, 22 bp, synthetic construct
  misc_feature 1..22: note = chemically synthesized
  source 1..22: mol_type = other DNA
tcctgtattttcaactcactgg

SEQ ID NO: 64257 - DNA, 22 bp, synthetic construct
  misc_feature 1..22: note = chemically synthesized
  source 1..22: mol_type = other DNA
cctgtattttcaactcactggt

SEQ ID NO: 64258 - DNA, 22 bp, synthetic construct
  misc_feature 1..22: note = chemically synthesized
  source 1..22: mol_type = other DNA
ctgtattttcaactcactggta

SEQ ID NO: 64259 - DNA, 22 bp, synthetic construct
  misc_feature 1..22: note = chemically synthesized
  source 1..22: mol_type = other DNA
tattttcaactcactggtagga

SEQ ID NO: 64260 - DNA, 22 bp, synthetic construct
  misc_feature 1..22: note = chemically synthesized
  source 1..22: mol_type = other DNA
tcaactcactggtaggattttt

SEQ ID NO: 64261 - DNA, 22 bp, synthetic construct
  misc_feature 1..22: note = chemically synthesized
  source 1..22: mol_type = other DNA
caactcactggtaggatttttt

SEQ ID NO: 64262 - DNA, 22 bp, synthetic construct
  misc_feature 1..22: note = chemically synthesized
  source 1..22: mol_type = other DNA
aactcactggtaggattttttc

SEQ ID NO: 64263 - DNA, 22 bp, synthetic construct
  misc_feature 1..22: note = chemically synthesized
  source 1..22: mol_type = other DNA
actggtaggattttttctgtct

SEQ ID NO: 64264 - DNA, 22 bp, synthetic construct
  misc_feature 1..22: note = chemically synthesized
  source 1..22: mol_type = other DNA
gtaggattttttctgtcttccc

SEQ ID NO: 64265 - DNA, 22 bp, synthetic construct
  misc_feature 1..22: note = chemically synthesized
  source 1..22: mol_type = other DNA
tttctgtcttccccctttatgt

SEQ ID NO: 64266 - DNA, 22 bp, synthetic construct
  misc_feature 1..22: note = chemically synthesized
  source 1..22: mol_type = other DNA
ttctgtcttccccctttatgta

SEQ ID NO: 64267 - DNA, 22 bp, synthetic construct
  misc_feature 1..22: note = chemically synthesized
  source 1..22: mol_type = other DNA
tctgtcttccccctttatgtag

SEQ ID NO: 64268 - DNA, 22 bp, synthetic construct
  misc_feature 1..22: note = chemically synthesized
  source 1..22: mol_type = other DNA
ctgtcttccccctttatgtaga

SEQ ID NO: 64269 - DNA, 22 bp, synthetic construct
  misc_feature 1..22: note = chemically synthesized
  source 1..22: mol_type = other DNA
tgtcttccccctttatgtagat

SEQ ID NO: 64270 - DNA, 22 bp, synthetic construct
  misc_feature 1..22: note = chemically synthesized
  source 1..22: mol_type = other DNA
tcttccccctttatgtagatga

SEQ ID NO: 64271 - DNA, 22 bp, synthetic construct
  misc_feature 1..22: note = chemically synthesized
  source 1..22: mol_type = other DNA
ccccctttatgtagatgatcca

SEQ ID NO: 64272 - DNA, 22 bp, synthetic construct
  misc_feature 1..22: note = chemically synthesized
  source 1..22: mol_type = other DNA
cccctttatgtagatgatccaa

SEQ ID NO: 64273 - DNA, 22 bp, synthetic construct
  misc_feature 1..22: note = chemically synthesized
  source 1..22: mol_type = other DNA
tatgtagatgatccaaagtcag

SEQ ID NO: 64274 - DNA, 22 bp, synthetic construct
  misc_feature 1..22: note = chemically synthesized
  source 1..22: mol_type = other DNA
atgtagatgatccaaagtcaga

SEQ ID NO: 64275 - DNA, 22 bp, synthetic construct
  misc_feature 1..22: note = chemically synthesized
  source 1..22: mol_type = other DNA
tgtagatgatccaaagtcagag

SEQ ID NO: 64276 - DNA, 22 bp, synthetic construct
  misc_feature 1..22: note = chemically synthesized
  source 1..22: mol_type = other DNA
gaagcatgagtagcccgtggct

SEQ ID NO: 64277 - DNA, 22 bp, synthetic construct
  misc_feature 1..22: note = chemically synthesized
  source 1..22: mol_type = other DNA
cctgaatagcctggggaaagca

SEQ ID NO: 64278 - DNA, 22 bp, synthetic construct
  misc_feature 1..22: note = chemically synthesized
  source 1..22: mol_type = other DNA
ctgaatagcctggggaaagcaa

SEQ ID NO: 64279 - DNA, 22 bp, synthetic construct
  misc_feature 1..22: note = chemically synthesized
  source 1..22: mol_type = other DNA
aatagcctggggaaagcaactt

SEQ ID NO: 64280 - DNA, 22 bp, synthetic construct
  misc_feature 1..22: note = chemically synthesized
  source 1..22: mol_type = other DNA
gggaaagcaacttctgatggac

SEQ ID NO: 64281 - DNA, 22 bp, synthetic construct
  misc_feature 1..22: note = chemically synthesized
  source 1..22: mol_type = other DNA
ctgatggacagacattgcgaga

SEQ ID NO: 64282 - DNA, 22 bp, synthetic construct
  misc_feature 1..22: note = chemically synthesized
  source 1..22: mol_type = other DNA
tgatggacagacattgcgagag

SEQ ID NO: 64283 - DNA, 22 bp, synthetic construct
  misc_feature 1..22: note = chemically synthesized
  source 1..22: mol_type = other DNA
atggacagacattgcgagagcg

SEQ ID NO: 64284 - DNA, 22 bp, synthetic construct
  misc_feature 1..22: note = chemically synthesized
  source 1..22: mol_type = other DNA
cgagagcgaatgccagcctctt

SEQ ID NO: 64285 - DNA, 22 bp, synthetic construct
  misc_feature 1..22: note = chemically synthesized
  source 1..22: mol_type = other DNA
ttttcttgctgatctcctctct

SEQ ID NO: 64286 - DNA, 22 bp, synthetic construct
  misc_feature 1..22: note = chemically synthesized
  source 1..22: mol_type = other DNA
ttcttgctgatctcctctctat

SEQ ID NO: 64287 - DNA, 22 bp, synthetic construct
  misc_feature 1..22: note = chemically synthesized
  source 1..22: mol_type = other DNA
tcttgctgatctcctctctata

SEQ ID NO: 64288 - DNA, 22 bp, synthetic construct
  misc_feature 1..22: note = chemically synthesized
  source 1..22: mol_type = other DNA
cttgctgatctcctctctatat

SEQ ID NO: 64289 - DNA, 22 bp, synthetic construct
  misc_feature 1..22: note = chemically synthesized
  source 1..22: mol_type = other DNA
ttgctgatctcctctctatatg

SEQ ID NO: 64290 - DNA, 22 bp, synthetic construct
  misc_feature 1..22: note = chemically synthesized
  source 1..22: mol_type = other DNA
gctgatctcctctctatatggt

SEQ ID NO: 64291 - DNA, 22 bp, synthetic construct
  misc_feature 1..22: note = chemically synthesized
  source 1..22: mol_type = other DNA
ctgatctcctctctatatggtt

SEQ ID NO: 64292 - DNA, 22 bp, synthetic construct
  misc_feature 1..22: note = chemically synthesized
  source 1..22: mol_type = other DNA
atctcctctctatatggttctt

SEQ ID NO: 64293 - DNA, 22 bp, synthetic construct
  misc_feature 1..22: note = chemically synthesized
  source 1..22: mol_type = other DNA
ctctctatatggttcttaccac

SEQ ID NO: 64294 - DNA, 22 bp, synthetic construct
  misc_feature 1..22: note = chemically synthesized
  source 1..22: mol_type = other DNA
tctatatggttcttaccactta

SEQ ID NO: 64295 - DNA, 22 bp, synthetic construct
  misc_feature 1..22: note = chemically synthesized
  source 1..22: mol_type = other DNA
tatatggttcttaccacttaaa

SEQ ID NO: 64296 - DNA, 22 bp, synthetic construct
  misc_feature 1..22: note = chemically synthesized
  source 1..22: mol_type = other DNA
tatggttcttaccacttaaaga

SEQ ID NO: 64297 - DNA, 22 bp, synthetic construct
  misc_feature 1..22: note = chemically synthesized
  source 1..22: mol_type = other DNA
ttaccacttaaagacgaggttg

SEQ ID NO: 64298 - DNA, 22 bp, synthetic construct
  misc_feature 1..22: note = chemically synthesized
  source 1..22: mol_type = other DNA
accacttaaagacgaggttgag

SEQ ID NO: 64299 - DNA, 22 bp, synthetic construct
  misc_feature 1..22: note = chemically synthesized
  source 1..22: mol_type = other DNA
ccacttaaagacgaggttgagc

SEQ ID NO: 64300 - DNA, 22 bp, synthetic construct
  misc_feature 1..22: note = chemically synthesized
  source 1..22: mol_type = other DNA
aaagacgaggttgagccagtct

SEQ ID NO: 64301 - DNA, 22 bp, synthetic construct
  misc_feature 1..22: note = chemically synthesized
  source 1..22: mol_type = other DNA
aagacgaggttgagccagtctc

SEQ ID NO: 64302 - DNA, 22 bp, synthetic construct
  misc_feature 1..22: note = chemically synthesized
  source 1..22: mol_type = other DNA
agccagtctccaatcacagcta

SEQ ID NO: 64303 - DNA, 22 bp, synthetic construct
  misc_feature 1..22: note = chemically synthesized
  source 1..22: mol_type = other DNA
caatcacagctacccaaaggag

SEQ ID NO: 64304 - DNA, 22 bp, synthetic construct
  misc_feature 1..22: note = chemically synthesized
  source 1..22: mol_type = other DNA
cccaaaggagtttaatgcccac

SEQ ID NO: 64305 - DNA, 22 bp, synthetic construct
  misc_feature 1..22: note = chemically synthesized
  source 1..22: mol_type = other DNA
aatgcccacagcttcctgaaga

SEQ ID NO: 64306 - DNA, 22 bp, synthetic construct
  misc_feature 1..22: note = chemically synthesized
  source 1..22: mol_type = other DNA
atgcccacagcttcctgaagat

SEQ ID NO: 64307 - DNA, 22 bp, synthetic construct
  misc_feature 1..22: note = chemically synthesized
  source 1..22: mol_type = other DNA
cctgaagatggaaccagatggg

SEQ ID NO: 64308 - DNA, 22 bp, synthetic construct
  misc_feature 1..22: note = chemically synthesized
  source 1..22: mol_type = other DNA
ctgaagatggaaccagatgggg

SEQ ID NO: 64309 - DNA, 22 bp, synthetic construct
  misc_feature 1..22: note = chemically synthesized
  source 1..22: mol_type = other DNA
aagatggaaccagatggggaag

SEQ ID NO: 64310 - DNA, 22 bp, synthetic construct
  misc_feature 1..22: note = chemically synthesized
  source 1..22: mol_type = other DNA
ctgaggtctgcgatcacggaca

SEQ ID NO: 64311 - DNA, 22 bp, synthetic construct
  misc_feature 1..22: note = chemically synthesized
  source 1..22: mol_type = other DNA
aggtctgcgatcacggacacca

SEQ ID NO: 64312 - DNA, 22 bp, synthetic construct
  misc_feature 1..22: note = chemically synthesized
  source 1..22: mol_type = other DNA
cgatcacggacaccaagatgaa

SEQ ID NO: 64313 - DNA, 22 bp, synthetic construct
  misc_feature 1..22: note = chemically synthesized
  source 1..22: mol_type = other DNA
ggagtcttggtaattcacctgg

SEQ ID NO: 64314 - DNA, 22 bp, synthetic construct
  misc_feature 1..22: note = chemically synthesized
  source 1..22: mol_type = other DNA
ggtaattcacctggaggtaatg

SEQ ID NO: 64315 - DNA, 22 bp, synthetic construct
  misc_feature 1..22: note = chemically synthesized
  source 1..22: mol_type = other DNA
gtaattcacctggaggtaatgt

SEQ ID NO: 64316 - DNA, 22 bp, synthetic construct
  misc_feature 1..22: note = chemically synthesized
  source 1..22: mol_type = other DNA
acctggaggtaatgtgttgact

SEQ ID NO: 64317 - DNA, 22 bp, synthetic construct
  misc_feature 1..22: note = chemically synthesized
  source 1..22: mol_type = other DNA
gaggtaatgtgttgactggatc

SEQ ID NO: 64318 - DNA, 22 bp, synthetic construct
  misc_feature 1..22: note = chemically synthesized
  source 1..22: mol_type = other DNA
actggatcccaaagtcatggag

SEQ ID NO: 64319 - DNA, 22 bp, synthetic construct
  misc_feature 1..22: note = chemically synthesized
  source 1..22: mol_type = other DNA
gatcccaaagtcatggagaaca

SEQ ID NO: 64320 - DNA, 22 bp, synthetic construct
  misc_feature 1..22: note = chemically synthesized
  source 1..22: mol_type = other DNA
attccttcctccatcctcattt

SEQ ID NO: 64321 - DNA, 22 bp, synthetic construct
  misc_feature 1..22: note = chemically synthesized
  source 1..22: mol_type = other DNA
cttcctccatcctcatttcctt

SEQ ID NO: 64322 - DNA, 22 bp, synthetic construct
  misc_feature 1..22: note = chemically synthesized
  source 1..22: mol_type = other DNA
cctccatcctcatttccttggc

SEQ ID NO: 64323 - DNA, 22 bp, synthetic construct
  misc_feature 1..22: note = chemically synthesized
  source 1..22: mol_type = other DNA
ctccatcctcatttccttggca

SEQ ID NO: 64324 - DNA, 22 bp, synthetic construct
  misc_feature 1..22: note = chemically synthesized
  source 1..22: mol_type = other DNA
catcctcatttccttggcacct

SEQ ID NO: 64325 - DNA, 22 bp, synthetic construct
  misc_feature 1..22: note = chemically synthesized
  source 1..22: mol_type = other DNA
atttccttggcacctcaggaag

SEQ ID NO: 64326 - DNA, 22 bp, synthetic construct
  misc_feature 1..22: note = chemically synthesized
  source 1..22: mol_type = other DNA
ccttggcacctcaggaagatgt

SEQ ID NO: 64327 - DNA, 22 bp, synthetic construct
  misc_feature 1..22: note = chemically synthesized
  source 1..22: mol_type = other DNA
cttggcacctcaggaagatgtc

SEQ ID NO: 64328 - DNA, 22 bp, synthetic construct
  misc_feature 1..22: note = chemically synthesized
  source 1..22: mol_type = other DNA
ggcacctcaggaagatgtcagc

SEQ ID NO: 64329 - DNA, 22 bp, synthetic construct
  misc_feature 1..22: note = chemically synthesized
  source 1..22: mol_type = other DNA
gcacctcaggaagatgtcagca

SEQ ID NO: 64330 - DNA, 22 bp, synthetic construct
  misc_feature 1..22: note = chemically synthesized
  source 1..22: mol_type = other DNA
aggaagatgtcagcagagccct

SEQ ID NO: 64331 - DNA, 22 bp, synthetic construct
  misc_feature 1..22: note = chemically synthesized
  source 1..22: mol_type = other DNA
gcagttattccaggcttggtgg

SEQ ID NO: 64332 - DNA, 22 bp, synthetic construct
  misc_feature 1..22: note = chemically synthesized
  source 1..22: mol_type = other DNA
cagttattccaggcttggtggt

SEQ ID NO: 64333 - DNA, 22 bp, synthetic construct
  misc_feature 1..22: note = chemically synthesized
  source 1..22: mol_type = other DNA
ttccaggcttggtggtgattgc

SEQ ID NO: 64334 - DNA, 22 bp, synthetic construct
  misc_feature 1..22: note = chemically synthesized
  source 1..22: mol_type = other DNA
caggcttggtggtgattgctct

SEQ ID NO: 64335 - DNA, 22 bp, synthetic construct
  misc_feature 1..22: note = chemically synthesized
  source 1..22: mol_type = other DNA
ggtggtgattgctctgctatga

SEQ ID NO: 64336 - DNA, 22 bp, synthetic construct
  misc_feature 1..22: note = chemically synthesized
  source 1..22: mol_type = other DNA
gtggtgattgctctgctatgag

SEQ ID NO: 64337 - DNA, 22 bp, synthetic construct
  misc_feature 1..22: note = chemically synthesized
  source 1..22: mol_type = other DNA
ctctgctatgagtctgtgcctt

SEQ ID NO: 64338 - DNA, 22 bp, synthetic construct
  misc_feature 1..22: note = chemically synthesized
  source 1..22: mol_type = other DNA
tgctatgagtctgtgccttgcc

SEQ ID NO: 64339 - DNA, 22 bp, synthetic construct
  misc_feature 1..22: note = chemically synthesized
  source 1..22: mol_type = other DNA
ctatgagtctgtgccttgcccc

SEQ ID NO: 64340 - DNA, 22 bp, synthetic construct
  misc_feature 1..22: note = chemically synthesized
  source 1..22: mol_type = other DNA
tgagtctgtgccttgcccctgt

SEQ ID NO: 64341 - DNA, 22 bp, synthetic construct
  misc_feature 1..22: note = chemically synthesized
  source 1..22: mol_type = other DNA
tgccttgcccctgttttatatg

SEQ ID NO: 64342 - DNA, 22 bp, synthetic construct
  misc_feature 1..22: note = chemically synthesized
  source 1..22: mol_type = other DNA
gcccctgttttatatgccctgt

SEQ ID NO: 64343 - DNA, 22 bp, synthetic construct
  misc_feature 1..22: note = chemically synthesized
  source 1..22: mol_type = other DNA
cccctgttttatatgccctgta

SEQ ID NO: 64344 - DNA, 22 bp, synthetic construct
  misc_feature 1..22: note = chemically synthesized
  source 1..22: mol_type = other DNA
ttttatatgccctgtatccagt

SEQ ID NO: 64345 - DNA, 22 bp, synthetic construct
  misc_feature 1..22: note = chemically synthesized
  source 1..22: mol_type = other DNA
tatatgccctgtatccagtatt

SEQ ID NO: 64346 - DNA, 22 bp, synthetic construct
  misc_feature 1..22: note = chemically synthesized
  source 1..22: mol_type = other DNA
atatgccctgtatccagtattc

SEQ ID NO: 64347 - DNA, 22 bp, synthetic construct
  misc_feature 1..22: note = chemically synthesized
  source 1..22: mol_type = other DNA
tatgccctgtatccagtattca

SEQ ID NO: 64348 - DNA, 22 bp, synthetic construct
  misc_feature 1..22: note = chemically synthesized
  source 1..22: mol_type = other DNA
tatccagtattcaggtcaaccc

SEQ ID NO: 64349 - DNA, 22 bp, synthetic construct
  misc_feature 1..22: note = chemically synthesized
  source 1..22: mol_type = other DNA
aggtcaacccagccctgatctt

SEQ ID NO: 64350 - DNA, 22 bp, synthetic construct
  misc_feature 1..22: note = chemically synthesized
  source 1..22: mol_type = other DNA
atctttggactcaaaaaccacg

SEQ ID NO: 64351 - DNA, 22 bp, synthetic construct
  misc_feature 1..22: note = chemically synthesized
  source 1..22: mol_type = other DNA
tggactcaaaaaccacgtttgt

SEQ ID NO: 64352 - DNA, 22 bp, synthetic construct
  misc_feature 1..22: note = chemically synthesized
  source 1..22: mol_type = other DNA
ggactcaaaaaccacgtttgtc

SEQ ID NO: 64353 - DNA, 22 bp, synthetic construct
  misc_feature 1..22: note = chemically synthesized
  source 1..22: mol_type = other DNA
gactcaaaaaccacgtttgtct

SEQ ID NO: 64354 - DNA, 22 bp, synthetic construct
  misc_feature 1..22: note = chemically synthesized
  source 1..22: mol_type = other DNA
aaaaaccacgtttgtctaaaat

SEQ ID NO: 64355 - DNA, 22 bp, synthetic construct
  misc_feature 1..22: note = chemically synthesized
  source 1..22: mol_type = other DNA
gtctaaaatgtattgatcaaag

SEQ ID NO: 64356 - DNA, 22 bp, synthetic construct
  misc_feature 1..22: note = chemically synthesized
  source 1..22: mol_type = other DNA
tctaaaatgtattgatcaaagg

SEQ ID NO: 64357 - DNA, 22 bp, synthetic construct
  misc_feature 1..22: note = chemically synthesized
  source 1..22: mol_type = other DNA
aaatgtattgatcaaaggtgca

SEQ ID NO: 64358 - DNA, 22 bp, synthetic construct
  misc_feature 1..22: note = chemically synthesized
  source 1..22: mol_type = other DNA
atcaaaggtgcatcaccagtag

SEQ ID NO: 64359 - DNA, 22 bp, synthetic construct
  misc_feature 1..22: note = chemically synthesized
  source 1..22: mol_type = other DNA
atgcaaacatgttcagggtgat

SEQ ID NO: 64360 - DNA, 22 bp, synthetic construct
  misc_feature 1..22: note = chemically synthesized
  source 1..22: mol_type = other DNA
agggtgatttacgtaaaataga

SEQ ID NO: 64361 - DNA, 22 bp, synthetic construct
  misc_feature 1..22: note = chemically synthesized
  source 1..22: mol_type = other DNA
acgtaaaatagaaaaacaggca

SEQ ID NO: 64362 - DNA, 22 bp, synthetic construct
  misc_feature 1..22: note = chemically synthesized
  source 1..22: mol_type = other DNA
cgtaaaatagaaaaacaggcac

SEQ ID NO: 64363 - DNA, 22 bp, synthetic construct
  misc_feature 1..22: note = chemically synthesized
  source 1..22: mol_type = other DNA
atcggccatgtactcagcaggg

SEQ ID NO: 64364 - DNA, 22 bp, synthetic construct
  misc_feature 1..22: note = chemically synthesized
  source 1..22: mol_type = other DNA
agcagggccaatgattaacttt

SEQ ID NO: 64365 - DNA, 22 bp, synthetic construct
  misc_feature 1..22: note = chemically synthesized
  source 1..22: mol_type = other DNA
actttggcatgcttcttggcag

SEQ ID NO: 64366 - DNA, 22 bp, synthetic construct
  misc_feature 1..22: note = chemically synthesized
  source 1..22: mol_type = other DNA
tggcatgcttcttggcagtgca

SEQ ID NO: 64367 - DNA, 22 bp, synthetic construct
  misc_feature 1..22: note = chemically synthesized
  source 1..22: mol_type = other DNA
ggcatgcttcttggcagtgcaa

SEQ ID NO: 64368 - DNA, 22 bp, synthetic construct
  misc_feature 1..22: note = chemically synthesized
  source 1..22: mol_type = other DNA
gcatgcttcttggcagtgcaag

SEQ ID NO: 64369 - DNA, 22 bp, synthetic construct
  misc_feature 1..22: note = chemically synthesized
  source 1..22: mol_type = other DNA
cttggcagtgcaagggtctgcc

SEQ ID NO: 64370 - DNA, 22 bp, synthetic construct
  misc_feature 1..22: note = chemically synthesized
  source 1..22: mol_type = other DNA
ttggcagtgcaagggtctgccc

SEQ ID NO: 64371 - DNA, 22 bp, synthetic construct
  misc_feature 1..22: note = chemically synthesized
  source 1..22: mol_type = other DNA
ggcagtgcaagggtctgccctc

SEQ ID NO: 64372 - DNA, 22 bp, synthetic construct
  misc_feature 1..22: note = chemically synthesized
  source 1..22: mol_type = other DNA
gcagtgcaagggtctgccctcc

SEQ ID NO: 64373 - DNA, 22 bp, synthetic construct
  misc_feature 1..22: note = chemically synthesized
  source 1..22: mol_type = other DNA
ccctcctggtccccgaaaccag

SEQ ID NO: 64374 - DNA, 22 bp, synthetic construct
  misc_feature 1..22: note = chemically synthesized
  source 1..22: mol_type = other DNA
ctggtccccgaaaccaggccag

SEQ ID NO: 64375 - DNA, 22 bp, synthetic construct
  misc_feature 1..22: note = chemically synthesized
  source 1..22: mol_type = other DNA
gtccccgaaaccaggccagaga

SEQ ID NO: 64376 - DNA, 22 bp, synthetic construct
  misc_feature 1..22: note = chemically synthesized
  source 1..22: mol_type = other DNA
catccacgatgattcttgcaaa

SEQ ID NO: 64377 - DNA, 22 bp, synthetic construct
  misc_feature 1..22: note = chemically synthesized
  source 1..22: mol_type = other DNA
ttgcaaagatgtcagattttct

SEQ ID NO: 64378 - DNA, 22 bp, synthetic construct
  misc_feature 1..22: note = chemically synthesized
  source 1..22: mol_type = other DNA
gcaaagatgtcagattttctat

SEQ ID NO: 64379 - DNA, 22 bp, synthetic construct
  misc_feature 1..22: note = chemically synthesized
  source 1..22: mol_type = other DNA
caaagatgtcagattttctatg

SEQ ID NO: 64380 - DNA, 22 bp, synthetic construct
  misc_feature 1..22: note = chemically synthesized
  source 1..22: mol_type = other DNA
tctatgcctgcaactgcactta

SEQ ID NO: 64381 - DNA, 22 bp, synthetic construct
  misc_feature 1..22: note = chemically synthesized
  source 1..22: mol_type = other DNA
ctatgcctgcaactgcacttat

SEQ ID NO: 64382 - DNA, 22 bp, synthetic construct
  misc_feature 1..22: note = chemically synthesized
  source 1..22: mol_type = other DNA
tatgcctgcaactgcacttatt

SEQ ID NO: 64383 - DNA, 22 bp, synthetic construct
  misc_feature 1..22: note = chemically synthesized
  source 1..22: mol_type = other DNA
tgcctgcaactgcacttatttg

SEQ ID NO: 64384 - DNA, 22 bp, synthetic construct
  misc_feature 1..22: note = chemically synthesized
  source 1..22: mol_type = other DNA
caactgcacttatttggggaca

SEQ ID NO: 64385 - DNA, 22 bp, synthetic construct
  misc_feature 1..22: note = chemically synthesized
  source 1..22: mol_type = other DNA
cacttatttggggacaaagaaa

SEQ ID NO: 64386 - DNA, 22 bp, synthetic construct
  misc_feature 1..22: note = chemically synthesized
  source 1..22: mol_type = other DNA
atttggggacaaagaaaaatct

SEQ ID NO: 64387 - DNA, 22 bp, synthetic construct
  misc_feature 1..22: note = chemically synthesized
  source 1..22: mol_type = other DNA
tttggggacaaagaaaaatctt

SEQ ID NO: 64388 - DNA, 22 bp, synthetic construct
  misc_feature 1..22: note = chemically synthesized
  source 1..22: mol_type = other DNA
ggggacaaagaaaaatcttggt

SEQ ID NO: 64389 - DNA, 22 bp, synthetic construct
  misc_feature 1..22: note = chemically synthesized
  source 1..22: mol_type = other DNA
gggacaaagaaaaatcttggtg

SEQ ID NO: 64390 - DNA, 22 bp, synthetic construct
  misc_feature 1..22: note = chemically synthesized
  source 1..22: mol_type = other DNA
ggtgctctagctattcaagttt

SEQ ID NO: 64391 - DNA, 22 bp, synthetic construct
  misc_feature 1..22: note = chemically synthesized
  source 1..22: mol_type = other DNA
gtgctctagctattcaagtttt

SEQ ID NO: 64392 - DNA, 22 bp, synthetic construct
  misc_feature 1..22: note = chemically synthesized
  source 1..22: mol_type = other DNA
tagctattcaagttttaagttc

SEQ ID NO: 64393 - DNA, 22 bp, synthetic construct
  misc_feature 1..22: note = chemically synthesized
  source 1..22: mol_type = other DNA
gctattcaagttttaagttctt

SEQ ID NO: 64394 - DNA, 22 bp, synthetic construct
  misc_feature 1..22: note = chemically synthesized
  source 1..22: mol_type = other DNA
ttcaagttttaagttcttaatt

SEQ ID NO: 64395 - DNA, 22 bp, synthetic construct
  misc_feature 1..22: note = chemically synthesized
  source 1..22: mol_type = other DNA
aagttttaagttcttaatttta

SEQ ID NO: 64396 - DNA, 22 bp, synthetic construct
  misc_feature 1..22: note = chemically synthesized
  source 1..22: mol_type = other DNA
taagttcttaattttaaaatta

SEQ ID NO: 64397 - DNA, 22 bp, synthetic construct
  misc_feature 1..22: note = chemically synthesized
  source 1..22: mol_type = other DNA
aagttcttaattttaaaattag

SEQ ID NO: 64398 - DNA, 22 bp, synthetic construct
  misc_feature 1..22: note = chemically synthesized
  source 1..22: mol_type = other DNA
agttcttaattttaaaattagt

SEQ ID NO: 64399 - DNA, 22 bp, synthetic construct
  misc_feature 1..22: note = chemically synthesized
  source 1..22: mol_type = other DNA
ttaattttaaaattagtaaagt

SEQ ID NO: 64400 - DNA, 22 bp, synthetic construct
  misc_feature 1..22: note = chemically synthesized
  source 1..22: mol_type = other DNA
aattttaaaattagtaaagttc

SEQ ID NO: 64401 - DNA, 22 bp, synthetic construct
  misc_feature 1..22: note = chemically synthesized
  source 1..22: mol_type = other DNA
attttaaaattagtaaagttct

SEQ ID NO: 64402 - DNA, 22 bp, synthetic construct
  misc_feature 1..22: note = chemically synthesized
  source 1..22: mol_type = other DNA
taaaattagtaaagttctggct

SEQ ID NO: 64403 - DNA, 22 bp, synthetic construct
  misc_feature 1..22: note = chemically synthesized
  source 1..22: mol_type = other DNA
aaaattagtaaagttctggctg

SEQ ID NO: 64404 - DNA, 22 bp, synthetic construct
  misc_feature 1..22: note = chemically synthesized
  source 1..22: mol_type = other DNA
aaattagtaaagttctggctgg

SEQ ID NO: 64405 - DNA, 22 bp, synthetic construct
  misc_feature 1..22: note = chemically synthesized
  source 1..22: mol_type = other DNA
gtaaagttctggctggttgtgg

SEQ ID NO: 64406 - DNA, 22 bp, synthetic construct
  misc_feature 1..22: note = chemically synthesized
  source 1..22: mol_type = other DNA
tggctggttgtggtggctcaca

SEQ ID NO: 64407 - DNA, 22 bp, synthetic construct
  misc_feature 1..22: note = chemically synthesized
  source 1..22: mol_type = other DNA
gctggttgtggtggctcacacc

SEQ ID NO: 64408 - DNA, 22 bp, synthetic construct
  misc_feature 1..22: note = chemically synthesized
  source 1..22: mol_type = other DNA
gttgtggtggctcacacctgta

SEQ ID NO: 64409 - DNA, 22 bp, synthetic construct
  misc_feature 1..22: note = chemically synthesized
  source 1..22: mol_type = other DNA
tggtggctcacacctgtaatcc

SEQ ID NO: 64410 - DNA, 22 bp, synthetic construct
  misc_feature 1..22: note = chemically synthesized
  source 1..22: mol_type = other DNA
acacctgtaatcccagcaattt

SEQ ID NO: 64411 - DNA, 22 bp, synthetic construct
  misc_feature 1..22: note = chemically synthesized
  source 1..22: mol_type = other DNA
taatcccagcaatttgggaggc

SEQ ID NO: 64412 - DNA, 22 bp, synthetic construct
  misc_feature 1..22: note = chemically synthesized
  source 1..22: mol_type = other DNA
gggaggctgaggtgggaggatc

SEQ ID NO: 64413 - DNA, 22 bp, synthetic construct
  misc_feature 1..22: note = chemically synthesized
  source 1..22: mol_type = other DNA
ggaggctgaggtgggaggatcc

SEQ ID NO: 64414 - DNA, 22 bp, synthetic construct
  misc_feature 1..22: note = chemically synthesized
  source 1..22: mol_type = other DNA
aggtgggaggatcccttgaagc

SEQ ID NO: 64415 - DNA, 22 bp, synthetic construct
  misc_feature 1..22: note = chemically synthesized
  source 1..22: mol_type = other DNA
gaagccaggagttggagaccag

SEQ ID NO: 64416 - DNA, 22 bp, synthetic construct
  misc_feature 1..22: note = chemically synthesized
  source 1..22: mol_type = other DNA
aagccaggagttggagaccagc

SEQ ID NO: 64417 - DNA, 22 bp, synthetic construct
  misc_feature 1..22: note = chemically synthesized
  source 1..22: mol_type = other DNA
gagaccagcctgggcaacaaag

SEQ ID NO: 64418 - DNA, 22 bp, synthetic construct
  misc_feature 1..22: note = chemically synthesized
  source 1..22: mol_type = other DNA
ggcaacaaagcaagaccctcgt

SEQ ID NO: 64419 - DNA, 22 bp, synthetic construct
  misc_feature 1..22: note = chemically synthesized
  source 1..22: mol_type = other DNA
gtttctacacaaaaatttaaaa

SEQ ID NO: 64420 - DNA, 22 bp, synthetic construct
  misc_feature 1..22: note = chemically synthesized
  source 1..22: mol_type = other DNA
ctacacaaaaatttaaaaaatt

SEQ ID NO: 64421 - DNA, 22 bp, synthetic construct
  misc_feature 1..22: note = chemically synthesized
  source 1..22: mol_type = other DNA
tacacaaaaatttaaaaaattg

SEQ ID NO: 64422 - DNA, 22 bp, synthetic construct
  misc_feature 1..22: note = chemically synthesized
  source 1..22: mol_type = other DNA
cacaaaaatttaaaaaattgtt

SEQ ID NO: 64423 - DNA, 22 bp, synthetic construct
  misc_feature 1..22: note = chemically synthesized
  source 1..22: mol_type = other DNA
aaaaaattgttttggtgtgtgt

SEQ ID NO: 64424 - DNA, 22 bp, synthetic construct
  misc_feature 1..22: note = chemically synthesized
  source 1..22: mol_type = other DNA
aaaaattgttttggtgtgtgtg

SEQ ID NO: 64425 - DNA, 22 bp, synthetic construct
  misc_feature 1..22: note = chemically synthesized
  source 1..22: mol_type = other DNA
ttttggtgtgtgtgatggtgta

SEQ ID NO: 64426 - DNA, 22 bp, synthetic construct
  misc_feature 1..22: note = chemically synthesized
  source 1..22: mol_type = other DNA
tggtgtgtgtgatggtgtaccc

SEQ ID NO: 64427 - DNA, 22 bp, synthetic construct
  misc_feature 1..22: note = chemically synthesized
  source 1..22: mol_type = other DNA
ggtgtgtgtgatggtgtaccct

SEQ ID NO: 64428 - DNA, 22 bp, synthetic construct
  misc_feature 1..22: note = chemically synthesized
  source 1..22: mol_type = other DNA
gtgtgtgtgatggtgtaccctt

SEQ ID NO: 64429 - DNA, 22 bp, synthetic construct
  misc_feature 1..22: note = chemically synthesized
  source 1..22: mol_type = other DNA
gtagtcccagctattcaggagg

SEQ ID NO: 64430 - DNA, 22 bp, synthetic construct
  misc_feature 1..22: note = chemically synthesized
  source 1..22: mol_type = other DNA
tagtcccagctattcaggaggc

SEQ ID NO: 64431 - DNA, 22 bp, synthetic construct
  misc_feature 1..22: note = chemically synthesized
  source 1..22: mol_type = other DNA
ttcaggaggctgaggcaggagg

SEQ ID NO: 64432 - DNA, 22 bp, synthetic construct
  misc_feature 1..22: note = chemically synthesized
  source 1..22: mol_type = other DNA
aggaggctgaggcaggaggatt

SEQ ID NO: 64433 - DNA, 22 bp, synthetic construct
  misc_feature 1..22: note = chemically synthesized
  source 1..22: mol_type = other DNA
aggcaggaggattgcttgagcc

SEQ ID NO: 64434 - DNA, 22 bp, synthetic construct
  misc_feature 1..22: note = chemically synthesized
  source 1..22: mol_type = other DNA
cttgagcccaggagttggagtc

SEQ ID NO: 64435 - DNA, 22 bp, synthetic construct
  misc_feature 1..22: note = chemically synthesized
  source 1..22: mol_type = other DNA
gagcccaggagttggagtctgc

SEQ ID NO: 64436 - DNA, 22 bp, synthetic construct
  misc_feature 1..22: note = chemically synthesized
  source 1..22: mol_type = other DNA
agcccaggagttggagtctgca

SEQ ID NO: 64437 - DNA, 22 bp, synthetic construct
  misc_feature 1..22: note = chemically synthesized
  source 1..22: mol_type = other DNA
gagtctgcagtgagctattgtc

SEQ ID NO: 64438 - DNA, 22 bp, synthetic construct
  misc_feature 1..22: note = chemically synthesized
  source 1..22: mol_type = other DNA
cagtgagctattgtcccaccgc

SEQ ID NO: 64439 - DNA, 22 bp, synthetic construct
  misc_feature 1..22: note = chemically synthesized
  source 1..22: mol_type = other DNA
ttgtcccaccgctgcactacag

SEQ ID NO: 64440 - DNA, 22 bp, synthetic construct
  misc_feature 1..22: note = chemically synthesized
  source 1..22: mol_type = other DNA
tcccaccgctgcactacagcct

SEQ ID NO: 64441 - DNA, 22 bp, synthetic construct
  misc_feature 1..22: note = chemically synthesized
  source 1..22: mol_type = other DNA
cactacagcctgggcaatcgag

SEQ ID NO: 64442 - DNA, 22 bp, synthetic construct
  misc_feature 1..22: note = chemically synthesized
  source 1..22: mol_type = other DNA
cagcctgggcaatcgagcaaga

SEQ ID NO: 64443 - DNA, 22 bp, synthetic construct
  misc_feature 1..22: note = chemically synthesized
  source 1..22: mol_type = other DNA
ggcaatcgagcaagaccccagt

SEQ ID NO: 64444 - DNA, 22 bp, synthetic construct
  misc_feature 1..22: note = chemically synthesized
  source 1..22: mol_type = other DNA
taaaacaaaacaaaacaaaaca

SEQ ID NO: 64445 - DNA, 22 bp, synthetic construct
  misc_feature 1..22: note = chemically synthesized
  source 1..22: mol_type = other DNA
aaacaaaacaaaacaaaacaaa

SEQ ID NO: 64446 - DNA, 22 bp, synthetic construct
  misc_feature 1..22: note = chemically synthesized
  source 1..22: mol_type = other DNA
ctattgtattggggactatcat

SEQ ID NO: 64447 - DNA, 22 bp, synthetic construct
  misc_feature 1..22: note = chemically synthesized
  source 1..22: mol_type = other DNA
tattgtattggggactatcatc

SEQ ID NO: 64448 - DNA, 22 bp, synthetic construct
  misc_feature 1..22: note = chemically synthesized
  source 1..22: mol_type = other DNA
ttgtattggggactatcatctt

SEQ ID NO: 64449 - DNA, 22 bp, synthetic construct
  misc_feature 1..22: note = chemically synthesized
  source 1..22: mol_type = other DNA
tattggggactatcatcttgct

SEQ ID NO: 64450 - DNA, 22 bp, synthetic construct
  misc_feature 1..22: note = chemically synthesized
  source 1..22: mol_type = other DNA
gggactatcatcttgctggtct

SEQ ID NO: 64451 - DNA, 22 bp, synthetic construct
  misc_feature 1..22: note = chemically synthesized
  source 1..22: mol_type = other DNA
tcatcttgctggtctttcctta

SEQ ID NO: 64452 - DNA, 22 bp, synthetic construct
  misc_feature 1..22: note = chemically synthesized
  source 1..22: mol_type = other DNA
gctggtctttccttaactgtat

SEQ ID NO: 64453 - DNA, 22 bp, synthetic construct
  misc_feature 1..22: note = chemically synthesized
  source 1..22: mol_type = other DNA
ctggtctttccttaactgtatt

SEQ ID NO: 64454 - DNA, 22 bp, synthetic construct
  misc_feature 1..22: note = chemically synthesized
  source 1..22: mol_type = other DNA
gtctttccttaactgtattaga

SEQ ID NO: 64455 - DNA, 22 bp, synthetic construct
  misc_feature 1..22: note = chemically synthesized
  source 1..22: mol_type = other DNA
tccttaactgtattagagtcta

SEQ ID NO: 64456 - DNA, 22 bp, synthetic construct
  misc_feature 1..22: note = chemically synthesized
  source 1..22: mol_type = other DNA
ccttaactgtattagagtctag

SEQ ID NO: 64457 - DNA, 22 bp, synthetic construct
  misc_feature 1..22: note = chemically synthesized
  source 1..22: mol_type = other DNA
cttaactgtattagagtctagg

SEQ ID NO: 64458 - DNA, 22 bp, synthetic construct
  misc_feature 1..22: note = chemically synthesized
  source 1..22: mol_type = other DNA
aactgtattagagtctagggtc

SEQ ID NO: 64459 - DNA, 22 bp, synthetic construct
  misc_feature 1..22: note = chemically synthesized
  source 1..22: mol_type = other DNA
actgtattagagtctagggtct

SEQ ID NO: 64460 - DNA, 22 bp, synthetic construct
  misc_feature 1..22: note = chemically synthesized
  source 1..22: mol_type = other DNA
tattagagtctagggtctgcct

SEQ ID NO: 64461 - DNA, 22 bp, synthetic construct
  misc_feature 1..22: note = chemically synthesized
  source 1..22: mol_type = other DNA
gagtctagggtctgcctctggt

SEQ ID NO: 64462 - DNA, 22 bp, synthetic construct
  misc_feature 1..22: note = chemically synthesized
  source 1..22: mol_type = other DNA
gggtctgcctctggtttgggag

SEQ ID NO: 64463 - DNA, 22 bp, synthetic construct
  misc_feature 1..22: note = chemically synthesized
  source 1..22: mol_type = other DNA
cctctggtttgggagatcaacc

SEQ ID NO: 64464 - DNA, 22 bp, synthetic construct
  misc_feature 1..22: note = chemically synthesized
  source 1..22: mol_type = other DNA
tggtttgggagatcaaccccct

SEQ ID NO: 64465 - DNA, 22 bp, synthetic construct
  misc_feature 1..22: note = chemically synthesized
  source 1..22: mol_type = other DNA
gtttgggagatcaacccccttc

SEQ ID NO: 64466 - DNA, 22 bp, synthetic construct
  misc_feature 1..22: note = chemically synthesized
  source 1..22: mol_type = other DNA
gggagatcaacccccttcctgg

SEQ ID NO: 64467 - DNA, 22 bp, synthetic construct
  misc_feature 1..22: note = chemically synthesized
  source 1..22: mol_type = other DNA
ggagatcaacccccttcctggt

SEQ ID NO: 64468 - DNA, 22 bp, synthetic construct
  misc_feature 1..22: note = chemically synthesized
  source 1..22: mol_type = other DNA
cctggtattggcctcatgtctc

SEQ ID NO: 64469 - DNA, 22 bp, synthetic construct
  misc_feature 1..22: note = chemically synthesized
  source 1..22: mol_type = other DNA
ctggtattggcctcatgtctct

SEQ ID NO: 64470 - DNA, 22 bp, synthetic construct
  misc_feature 1..22: note = chemically synthesized
  source 1..22: mol_type = other DNA
gtattggcctcatgtctcttag

SEQ ID NO: 64471 - DNA, 22 bp, synthetic construct
  misc_feature 1..22: note = chemically synthesized
  source 1..22: mol_type = other DNA
gcctcatgtctcttagggccag

SEQ ID NO: 64472 - DNA, 22 bp, synthetic construct
  misc_feature 1..22: note = chemically synthesized
  source 1..22: mol_type = other DNA
atgtctcttagggccagaaagt

SEQ ID NO: 64473 - DNA, 22 bp, synthetic construct
  misc_feature 1..22: note = chemically synthesized
  source 1..22: mol_type = other DNA
ttagggccagaaagtaatcgtt

SEQ ID NO: 64474 - DNA, 22 bp, synthetic construct
  misc_feature 1..22: note = chemically synthesized
  source 1..22: mol_type = other DNA
agggccagaaagtaatcgtttt

SEQ ID NO: 64475 - DNA, 22 bp, synthetic construct
  misc_feature 1..22: note = chemically synthesized
  source 1..22: mol_type = other DNA
gggccagaaagtaatcgttttt

SEQ ID NO: 64476 - DNA, 22 bp, synthetic construct
  misc_feature 1..22: note = chemically synthesized
  source 1..22: mol_type = other DNA
ttgaatgcagtgattaattcat

SEQ ID NO: 64477 - DNA, 22 bp, synthetic construct
  misc_feature 1..22: note = chemically synthesized
  source 1..22: mol_type = other DNA
tgaatgcagtgattaattcatt

SEQ ID NO: 64478 - DNA, 22 bp, synthetic construct
  misc_feature 1..22: note = chemically synthesized
  source 1..22: mol_type = other DNA
gaatgcagtgattaattcattt

SEQ ID NO: 64479 - DNA, 22 bp, synthetic construct
  misc_feature 1..22: note = chemically synthesized
  source 1..22: mol_type = other DNA
aatgcagtgattaattcattta

SEQ ID NO: 64480 - DNA, 22 bp, synthetic construct
  misc_feature 1..22: note = chemically synthesized
  source 1..22: mol_type = other DNA
attcatttaatgaccttaaagt

SEQ ID NO: 64481 - DNA, 22 bp, synthetic construct
  misc_feature 1..22: note = chemically synthesized
  source 1..22: mol_type = other DNA
atttaatgaccttaaagttaca

SEQ ID NO: 64482 - DNA, 22 bp, synthetic construct
  misc_feature 1..22: note = chemically synthesized
  source 1..22: mol_type = other DNA
aatgaccttaaagttacagccc

SEQ ID NO: 64483 - DNA, 22 bp, synthetic construct
  misc_feature 1..22: note = chemically synthesized
  source 1..22: mol_type = other DNA
atgaccttaaagttacagccct

SEQ ID NO: 64484 - DNA, 22 bp, synthetic construct
  misc_feature 1..22: note = chemically synthesized
  source 1..22: mol_type = other DNA
aaagttacagcccttggtgttg

SEQ ID NO: 64485 - DNA, 22 bp, synthetic construct
  misc_feature 1..22: note = chemically synthesized
  source 1..22: mol_type = other DNA
aagttacagcccttggtgttgt

SEQ ID NO: 64486 - DNA, 22 bp, synthetic construct
  misc_feature 1..22: note = chemically synthesized
  source 1..22: mol_type = other DNA
cagcccttggtgttgttttctt

SEQ ID NO: 64487 - DNA, 22 bp, synthetic construct
  misc_feature 1..22: note = chemically synthesized
  source 1..22: mol_type = other DNA
ggtgttgttttcttttttaaat

SEQ ID NO: 64488 - DNA, 22 bp, synthetic construct
  misc_feature 1..22: note = chemically synthesized
  source 1..22: mol_type = other DNA
gtgttgttttcttttttaaatt

SEQ ID NO: 64489 - DNA, 22 bp, synthetic construct
  misc_feature 1..22: note = chemically synthesized
  source 1..22: mol_type = other DNA
ttttcttttttaaattttctct

SEQ ID NO: 64490 - DNA, 22 bp, synthetic construct
  misc_feature 1..22: note = chemically synthesized
  source 1..22: mol_type = other DNA
tcttttttaaattttctctctc

SEQ ID NO: 64491 - DNA, 22 bp, synthetic construct
  misc_feature 1..22: note = chemically synthesized
  source 1..22: mol_type = other DNA
cttttttaaattttctctctct

SEQ ID NO: 64492 - DNA, 22 bp, synthetic construct
  misc_feature 1..22: note = chemically synthesized
  source 1..22: mol_type = other DNA
ttttttaaattttctctctctt

SEQ ID NO: 64493 - DNA, 22 bp, synthetic construct
  misc_feature 1..22: note = chemically synthesized
  source 1..22: mol_type = other DNA
ttttaaattttctctctctttt

SEQ ID NO: 64494 - DNA, 22 bp, synthetic construct
  misc_feature 1..22: note = chemically synthesized
  source 1..22: mol_type = other DNA
tttaaattttctctctcttttt

SEQ ID NO: 64495 - DNA, 22 bp, synthetic construct
  misc_feature 1..22: note = chemically synthesized
  source 1..22: mol_type = other DNA
ttaaattttctctctctttttt

SEQ ID NO: 64496 - DNA, 22 bp, synthetic construct
  misc_feature 1..22: note = chemically synthesized
  source 1..22: mol_type = other DNA
taaattttctctctcttttttt

SEQ ID NO: 64497 - DNA, 22 bp, synthetic construct
  misc_feature 1..22: note = chemically synthesized
  source 1..22: mol_type = other DNA
aaattttctctctctttttttt

SEQ ID NO: 64498 - DNA, 22 bp, synthetic construct
  misc_feature 1..22: note = chemically synthesized
  source 1..22: mol_type = other DNA
aattttctctctcttttttttg

SEQ ID NO: 64499 - DNA, 22 bp, synthetic construct
  misc_feature 1..22: note = chemically synthesized
  source 1..22: mol_type = other DNA
tctctctcttttttttgaaaca

SEQ ID NO: 64500 - DNA, 22 bp, synthetic construct
  misc_feature 1..22: note = chemically synthesized
  source 1..22: mol_type = other DNA
ctctctcttttttttgaaacag

SEQ ID NO: 64501 - DNA, 22 bp, synthetic construct
  misc_feature 1..22: note = chemically synthesized
  source 1..22: mol_type = other DNA
tctctcttttttttgaaacagg

SEQ ID NO: 64502 - DNA, 22 bp, synthetic construct
  misc_feature 1..22: note = chemically synthesized
  source 1..22: mol_type = other DNA
tctcttttttttgaaacagggt

SEQ ID NO: 64503 - DNA, 22 bp, synthetic construct
  misc_feature 1..22: note = chemically synthesized
  source 1..22: mol_type = other DNA
tcttttttttgaaacagggtct

SEQ ID NO: 64504 - DNA, 22 bp, synthetic construct
  misc_feature 1..22: note = chemically synthesized
  source 1..22: mol_type = other DNA
ttttttttgaaacagggtctca

SEQ ID NO: 64505 - DNA, 22 bp, synthetic construct
  misc_feature 1..22: note = chemically synthesized
  source 1..22: mol_type = other DNA
ttttttgaaacagggtctcact

SEQ ID NO: 64506 - DNA, 22 bp, synthetic construct
  misc_feature 1..22: note = chemically synthesized
  source 1..22: mol_type = other DNA
tttttgaaacagggtctcactc

SEQ ID NO: 64507 - DNA, 22 bp, synthetic construct
  misc_feature 1..22: note = chemically synthesized
  source 1..22: mol_type = other DNA
ttttgaaacagggtctcactct

SEQ ID NO: 64508 - DNA, 22 bp, synthetic construct
  misc_feature 1..22: note = chemically synthesized
  source 1..22: mol_type = other DNA
tttgaaacagggtctcactctg

SEQ ID NO: 64509 - DNA, 22 bp, synthetic construct
  misc_feature 1..22: note = chemically synthesized
  source 1..22: mol_type = other DNA
ttgaaacagggtctcactctgt

SEQ ID NO: 64510 - DNA, 22 bp, synthetic construct
  misc_feature 1..22: note = chemically synthesized
  source 1..22: mol_type = other DNA
tgaaacagggtctcactctgtc

SEQ ID NO: 64511 - DNA, 22 bp, synthetic construct
  misc_feature 1..22: note = chemically synthesized
  source 1..22: mol_type = other DNA
gaaacagggtctcactctgtct

SEQ ID NO: 64512 - DNA, 22 bp, synthetic construct
  misc_feature 1..22: note = chemically synthesized
  source 1..22: mol_type = other DNA
aaacagggtctcactctgtctc

SEQ ID NO: 64513 - DNA, 22 bp, synthetic construct
  misc_feature 1..22: note = chemically synthesized
  source 1..22: mol_type = other DNA
actctgtctcccaggctggagt

SEQ ID NO: 64514 - DNA, 22 bp, synthetic construct
  misc_feature 1..22: note = chemically synthesized
  source 1..22: mol_type = other DNA
tgtctcccaggctggagtgcag

SEQ ID NO: 64515 - DNA, 22 bp, synthetic construct
  misc_feature 1..22: note = chemically synthesized
  source 1..22: mol_type = other DNA
tctcccaggctggagtgcagtg

SEQ ID NO: 64516 - DNA, 22 bp, synthetic construct
  misc_feature 1..22: note = chemically synthesized
  source 1..22: mol_type = other DNA
ccaggctggagtgcagtggcat

SEQ ID NO: 64517 - DNA, 22 bp, synthetic construct
  misc_feature 1..22: note = chemically synthesized
  source 1..22: mol_type = other DNA
gagtgcagtggcataatcacgg

SEQ ID NO: 64518 - DNA, 22 bp, synthetic construct
  misc_feature 1..22: note = chemically synthesized
  source 1..22: mol_type = other DNA
actgcagcctcaacctcctggg

SEQ ID NO: 64519 - DNA, 22 bp, synthetic construct
  misc_feature 1..22: note = chemically synthesized
  source 1..22: mol_type = other DNA
cagcctcaacctcctgggctaa

SEQ ID NO: 64520 - DNA, 22 bp, synthetic construct
  misc_feature 1..22: note = chemically synthesized
  source 1..22: mol_type = other DNA
aacctcctgggctaatgtgatc

SEQ ID NO: 64521 - DNA, 22 bp, synthetic construct
  misc_feature 1..22: note = chemically synthesized
  source 1..22: mol_type = other DNA
ctgggctaatgtgatcctccca

SEQ ID NO: 64522 - DNA, 22 bp, synthetic construct
  misc_feature 1..22: note = chemically synthesized
  source 1..22: mol_type = other DNA
ggctaatgtgatcctcccacct

SEQ ID NO: 64523 - DNA, 22 bp, synthetic construct
  misc_feature 1..22: note = chemically synthesized
  source 1..22: mol_type = other DNA
atgtgatcctcccacctcagcc

SEQ ID NO: 64524 - DNA, 22 bp, synthetic construct
  misc_feature 1..22: note = chemically synthesized
  source 1..22: mol_type = other DNA
ccacctcagcctcctgagtagc

SEQ ID NO: 64525 - DNA, 22 bp, synthetic construct
  misc_feature 1..22: note = chemically synthesized
  source 1..22: mol_type = other DNA
agcctcctgagtagctgggacc

SEQ ID NO: 64526 - DNA, 22 bp, synthetic construct
  misc_feature 1..22: note = chemically synthesized
  source 1..22: mol_type = other DNA
ctgagtagctgggaccacaggc

SEQ ID NO: 64527 - DNA, 22 bp, synthetic construct
  misc_feature 1..22: note = chemically synthesized
  source 1..22: mol_type = other DNA
agtagctgggaccacaggcaca

SEQ ID NO: 64528 - DNA, 22 bp, synthetic construct
  misc_feature 1..22: note = chemically synthesized
  source 1..22: mol_type = other DNA
ggaccacaggcacacgccacca

SEQ ID NO: 64529 - DNA, 22 bp, synthetic construct
  misc_feature 1..22: note = chemically synthesized
  source 1..22: mol_type = other DNA
gctaatttttctatcttttgta

SEQ ID NO: 64530 - DNA, 22 bp, synthetic construct
  misc_feature 1..22: note = chemically synthesized
  source 1..22: mol_type = other DNA
atttttctatcttttgtagaga

SEQ ID NO: 64531 - DNA, 22 bp, synthetic construct
  misc_feature 1..22: note = chemically synthesized
  source 1..22: mol_type = other DNA
ttctatcttttgtagagatggg

SEQ ID NO: 64532 - DNA, 22 bp, synthetic construct
  misc_feature 1..22: note = chemically synthesized
  source 1..22: mol_type = other DNA
tctatcttttgtagagatgggg

SEQ ID NO: 64533 - DNA, 22 bp, synthetic construct
  misc_feature 1..22: note = chemically synthesized
  source 1..22: mol_type = other DNA
ctatcttttgtagagatggggt

SEQ ID NO: 64534 - DNA, 22 bp, synthetic construct
  misc_feature 1..22: note = chemically synthesized
  source 1..22: mol_type = other DNA
tatcttttgtagagatggggtt

SEQ ID NO: 64535 - DNA, 22 bp, synthetic construct
  misc_feature 1..22: note = chemically synthesized
  source 1..22: mol_type = other DNA
tcttttgtagagatggggtttt

SEQ ID NO: 64536 - DNA, 22 bp, synthetic construct
  misc_feature 1..22: note = chemically synthesized
  source 1..22: mol_type = other DNA
ttgtagagatggggtttttcca

SEQ ID NO: 64537 - DNA, 22 bp, synthetic construct
  misc_feature 1..22: note = chemically synthesized
  source 1..22: mol_type = other DNA
tgtagagatggggtttttccat

SEQ ID NO: 64538 - DNA, 22 bp, synthetic construct
  misc_feature 1..22: note = chemically synthesized
  source 1..22: mol_type = other DNA
gtagagatggggtttttccatg

SEQ ID NO: 64539 - DNA, 22 bp, synthetic construct
  misc_feature 1..22: note = chemically synthesized
  source 1..22: mol_type = other DNA
tagagatggggtttttccatgt

SEQ ID NO: 64540 - DNA, 22 bp, synthetic construct
  misc_feature 1..22: note = chemically synthesized
  source 1..22: mol_type = other DNA
ttccatgttgcccaggctggtc

SEQ ID NO: 64541 - DNA, 22 bp, synthetic construct
  misc_feature 1..22: note = chemically synthesized
  source 1..22: mol_type = other DNA
tccatgttgcccaggctggtct

SEQ ID NO: 64542 - DNA, 22 bp, synthetic construct
  misc_feature 1..22: note = chemically synthesized
  source 1..22: mol_type = other DNA
ccatgttgcccaggctggtctt

SEQ ID NO: 64543 - DNA, 22 bp, synthetic construct
  misc_feature 1..22: note = chemically synthesized
  source 1..22: mol_type = other DNA
catgttgcccaggctggtcttg

SEQ ID NO: 64544 - DNA, 22 bp, synthetic construct
  misc_feature 1..22: note = chemically synthesized
  source 1..22: mol_type = other DNA
cccaggctggtcttgaattcct

SEQ ID NO: 64545 - DNA, 22 bp, synthetic construct
  misc_feature 1..22: note = chemically synthesized
  source 1..22: mol_type = other DNA
gtcttgaattcctgagctcaag

SEQ ID NO: 64546 - DNA, 22 bp, synthetic construct
  misc_feature 1..22: note = chemically synthesized
  source 1..22: mol_type = other DNA
gaattcctgagctcaagagatc

SEQ ID NO: 64547 - DNA, 22 bp, synthetic construct
  misc_feature 1..22: note = chemically synthesized
  source 1..22: mol_type = other DNA
aattcctgagctcaagagatct

SEQ ID NO: 64548 - DNA, 22 bp, synthetic construct
  misc_feature 1..22: note = chemically synthesized
  source 1..22: mol_type = other DNA
ctgagctcaagagatctgccag

SEQ ID NO: 64549 - DNA, 22 bp, synthetic construct
  misc_feature 1..22: note = chemically synthesized
  source 1..22: mol_type = other DNA
agctcaagagatctgccagtct

SEQ ID NO: 64550 - DNA, 22 bp, synthetic construct
  misc_feature 1..22: note = chemically synthesized
  source 1..22: mol_type = other DNA
aagagatctgccagtcttggct

SEQ ID NO: 64551 - DNA, 22 bp, synthetic construct
  misc_feature 1..22: note = chemically synthesized
  source 1..22: mol_type = other DNA
ccagtcttggcttcccaaagct

SEQ ID NO: 64552 - DNA, 22 bp, synthetic construct
  misc_feature 1..22: note = chemically synthesized
  source 1..22: mol_type = other DNA
ggcttcccaaagctctgggatt

SEQ ID NO: 64553 - DNA, 22 bp, synthetic construct
  misc_feature 1..22: note = chemically synthesized
  source 1..22: mol_type = other DNA
gcttcccaaagctctgggatta

SEQ ID NO: 64554 - DNA, 22 bp, synthetic construct
  misc_feature 1..22: note = chemically synthesized
  source 1..22: mol_type = other DNA
cccaaagctctgggattacagg

SEQ ID NO: 64555 - DNA, 22 bp, synthetic construct
  misc_feature 1..22: note = chemically synthesized
  source 1..22: mol_type = other DNA
ccaaagctctgggattacaggt

SEQ ID NO: 64556 - DNA, 22 bp, synthetic construct
  misc_feature 1..22: note = chemically synthesized
  source 1..22: mol_type = other DNA
tgggattacaggtgtgaaccac

SEQ ID NO: 64557 - DNA, 22 bp, synthetic construct
  misc_feature 1..22: note = chemically synthesized
  source 1..22: mol_type = other DNA
ggattacaggtgtgaaccacca

SEQ ID NO: 64558 - DNA, 22 bp, synthetic construct
  misc_feature 1..22: note = chemically synthesized
  source 1..22: mol_type = other DNA
caggtgtgaaccaccatgcctg

SEQ ID NO: 64559 - DNA, 22 bp, synthetic construct
  misc_feature 1..22: note = chemically synthesized
  source 1..22: mol_type = other DNA
gccaagtgttttaactcatacg

SEQ ID NO: 64560 - DNA, 22 bp, synthetic construct
  misc_feature 1..22: note = chemically synthesized
  source 1..22: mol_type = other DNA
taactcatacgtttaagcaaaa

SEQ ID NO: 64561 - DNA, 22 bp, synthetic construct
  misc_feature 1..22: note = chemically synthesized
  source 1..22: mol_type = other DNA
aactcatacgtttaagcaaaat

SEQ ID NO: 64562 - DNA, 22 bp, synthetic construct
  misc_feature 1..22: note = chemically synthesized
  source 1..22: mol_type = other DNA
actcatacgtttaagcaaaata

SEQ ID NO: 64563 - DNA, 22 bp, synthetic construct
  misc_feature 1..22: note = chemically synthesized
  source 1..22: mol_type = other DNA
atacgtttaagcaaaataatga

SEQ ID NO: 64564 - DNA, 22 bp, synthetic construct
  misc_feature 1..22: note = chemically synthesized
  source 1..22: mol_type = other DNA
aagcaaaataatgaatgtatag

SEQ ID NO: 64565 - DNA, 22 bp, synthetic construct
  misc_feature 1..22: note = chemically synthesized
  source 1..22: mol_type = other DNA
agcaaaataatgaatgtatagt

SEQ ID NO: 64566 - DNA, 22 bp, synthetic construct
  misc_feature 1..22: note = chemically synthesized
  source 1..22: mol_type = other DNA
actgtgcaacaatatgatgaat

SEQ ID NO: 64567 - DNA, 22 bp, synthetic construct
  misc_feature 1..22: note = chemically synthesized
  source 1..22: mol_type = other DNA
ctgtgcaacaatatgatgaatg

SEQ ID NO: 64568 - DNA, 22 bp, synthetic construct
  misc_feature 1..22: note = chemically synthesized
  source 1..22: mol_type = other DNA
tgcaacaatatgatgaatgtat

SEQ ID NO: 64569 - DNA, 22 bp, synthetic construct
  misc_feature 1..22: note = chemically synthesized
  source 1..22: mol_type = other DNA
caaataagaataccagcaaaat

SEQ ID NO: 64570 - DNA, 22 bp, synthetic construct
  misc_feature 1..22: note = chemically synthesized
  source 1..22: mol_type = other DNA
gagacttaaagagtttgaaact

SEQ ID NO: 64571 - DNA, 22 bp, synthetic construct
  misc_feature 1..22: note = chemically synthesized
  source 1..22: mol_type = other DNA
aaagagtttgaaactttcagtt

SEQ ID NO: 64572 - DNA, 22 bp, synthetic construct
  misc_feature 1..22: note = chemically synthesized
  source 1..22: mol_type = other DNA
aagagtttgaaactttcagtta

SEQ ID NO: 64573 - DNA, 22 bp, synthetic construct
  misc_feature 1..22: note = chemically synthesized
  source 1..22: mol_type = other DNA
gaaactttcagttatttttgaa

SEQ ID NO: 64574 - DNA, 22 bp, synthetic construct
  misc_feature 1..22: note = chemically synthesized
  source 1..22: mol_type = other DNA
aaactttcagttatttttgaaa

SEQ ID NO: 64575 - DNA, 22 bp, synthetic construct
  misc_feature 1..22: note = chemically synthesized
  source 1..22: mol_type = other DNA
tcagttatttttgaaaaagggc

SEQ ID NO: 64576 - DNA, 22 bp, synthetic construct
  misc_feature 1..22: note = chemically synthesized
  source 1..22: mol_type = other DNA
cagttatttttgaaaaagggct

SEQ ID NO: 64577 - DNA, 22 bp, synthetic construct
  misc_feature 1..22: note = chemically synthesized
  source 1..22: mol_type = other DNA
agttatttttgaaaaagggctt

SEQ ID NO: 64578 - DNA, 22 bp, synthetic construct
  misc_feature 1..22: note = chemically synthesized
  source 1..22: mol_type = other DNA
tttttgaaaaagggcttctata

SEQ ID NO: 64579 - DNA, 22 bp, synthetic construct
  misc_feature 1..22: note = chemically synthesized
  source 1..22: mol_type = other DNA
ttgaaaaagggcttctatatct

SEQ ID NO: 64580 - DNA, 22 bp, synthetic construct
  misc_feature 1..22: note = chemically synthesized
  source 1..22: mol_type = other DNA
tgaaaaagggcttctatatctt

SEQ ID NO: 64581 - DNA, 22 bp, synthetic construct
  misc_feature 1..22: note = chemically synthesized
  source 1..22: mol_type = other DNA
gaaaaagggcttctatatcttg

SEQ ID NO: 64582 - DNA, 22 bp, synthetic construct
  misc_feature 1..22: note = chemically synthesized
  source 1..22: mol_type = other DNA
aaaaagggcttctatatcttga

SEQ ID NO: 64583 - DNA, 22 bp, synthetic construct
  misc_feature 1..22: note = chemically synthesized
  source 1..22: mol_type = other DNA
ctatatcttgagctttcttata

SEQ ID NO: 64584 - DNA, 22 bp, synthetic construct
  misc_feature 1..22: note = chemically synthesized
  source 1..22: mol_type = other DNA
tatatcttgagctttcttatac

SEQ ID NO: 64585 - DNA, 22 bp, synthetic construct
  misc_feature 1..22: note = chemically synthesized
  source 1..22: mol_type = other DNA
tatcttgagctttcttatacat

SEQ ID NO: 64586 - DNA, 22 bp, synthetic construct
  misc_feature 1..22: note = chemically synthesized
  source 1..22: mol_type = other DNA
gagctttcttatacatatgtgt

SEQ ID NO: 64587 - DNA, 22 bp, synthetic construct
  misc_feature 1..22: note = chemically synthesized
  source 1..22: mol_type = other DNA
agctttcttatacatatgtgtg

SEQ ID NO: 64588 - DNA, 22 bp, synthetic construct
  misc_feature 1..22: note = chemically synthesized
  source 1..22: mol_type = other DNA
tcttatacatatgtgtgtagat

SEQ ID NO: 64589 - DNA, 22 bp, synthetic construct
  misc_feature 1..22: note = chemically synthesized
  source 1..22: mol_type = other DNA
cttatacatatgtgtgtagata

SEQ ID NO: 64590 - DNA, 22 bp, synthetic construct
  misc_feature 1..22: note = chemically synthesized
  source 1..22: mol_type = other DNA
ttatacatatgtgtgtagatat

SEQ ID NO: 64591 - DNA, 22 bp, synthetic construct
  misc_feature 1..22: note = chemically synthesized
  source 1..22: mol_type = other DNA
atacatatgtgtgtagatatac

SEQ ID NO: 64592 - DNA, 22 bp, synthetic construct
  misc_feature 1..22: note = chemically synthesized
  source 1..22: mol_type = other DNA
tacatatgtgtgtagatataca

SEQ ID NO: 64593 - DNA, 22 bp, synthetic construct
  misc_feature 1..22: note = chemically synthesized
  source 1..22: mol_type = other DNA
aagatacactgtgtgtgtgtat

SEQ ID NO: 64594 - DNA, 22 bp, synthetic construct
  misc_feature 1..22: note = chemically synthesized
  source 1..22: mol_type = other DNA
tgtgtgtgtatatgtgtgtgtg

SEQ ID NO: 64595 - DNA, 22 bp, synthetic construct
  misc_feature 1..22: note = chemically synthesized
  source 1..22: mol_type = other DNA
tatatcagcctacaaatagtag

SEQ ID NO: 64596 - DNA, 22 bp, synthetic construct
  misc_feature 1..22: note = chemically synthesized
  source 1..22: mol_type = other DNA
caaatagtagagagaccaaaac

SEQ ID NO: 64597 - DNA, 22 bp, synthetic construct
  misc_feature 1..22: note = chemically synthesized
  source 1..22: mol_type = other DNA
acacttgggtcacggaggactg

SEQ ID NO: 64598 - DNA, 22 bp, synthetic construct
  misc_feature 1..22: note = chemically synthesized
  source 1..22: mol_type = other DNA
gggtcacggaggactgtgaaag

SEQ ID NO: 64599 - DNA, 22 bp, synthetic construct
  misc_feature 1..22: note = chemically synthesized
  source 1..22: mol_type = other DNA
ggtcacggaggactgtgaaagg

SEQ ID NO: 64600 - DNA, 22 bp, synthetic construct
  misc_feature 1..22: note = chemically synthesized
  source 1..22: mol_type = other DNA
tgaaaggaaccagggaatgaat

SEQ ID NO: 64601 - DNA, 22 bp, synthetic construct
  misc_feature 1..22: note = chemically synthesized
  source 1..22: mol_type = other DNA
atgcattttaaaaaatagggct

SEQ ID NO: 64602 - DNA, 22 bp, synthetic construct
  misc_feature 1..22: note = chemically synthesized
  source 1..22: mol_type = other DNA
taaaaaatagggctatttaatc

SEQ ID NO: 64603 - DNA, 22 bp, synthetic construct
  misc_feature 1..22: note = chemically synthesized
  source 1..22: mol_type = other DNA
aaaaaatagggctatttaatca

SEQ ID NO: 64604 - DNA, 22 bp, synthetic construct
  misc_feature 1..22: note = chemically synthesized
  source 1..22: mol_type = other DNA
aaaaatagggctatttaatcat

SEQ ID NO: 64605 - DNA, 22 bp, synthetic construct
  misc_feature 1..22: note = chemically synthesized
  source 1..22: mol_type = other DNA
tttaatcatgcttcatatcact

SEQ ID NO: 64606 - DNA, 22 bp, synthetic construct
  misc_feature 1..22: note = chemically synthesized
  source 1..22: mol_type = other DNA
aatcatgcttcatatcactatt

SEQ ID NO: 64607 - DNA, 22 bp, synthetic construct
  misc_feature 1..22: note = chemically synthesized
  source 1..22: mol_type = other DNA
atcatgcttcatatcactatta

SEQ ID NO: 64608 - DNA, 22 bp, synthetic construct
  misc_feature 1..22: note = chemically synthesized
  source 1..22: mol_type = other DNA
catatcactattatttattatt

SEQ ID NO: 64609 - DNA, 22 bp, synthetic construct
  misc_feature 1..22: note = chemically synthesized
  source 1..22: mol_type = other DNA
atatcactattatttattattt

SEQ ID NO: 64610 - DNA, 22 bp, synthetic construct
  misc_feature 1..22: note = chemically synthesized
  source 1..22: mol_type = other DNA
ttatttattatttatttattta

SEQ ID NO: 64611 - DNA, 22 bp, synthetic construct
  misc_feature 1..22: note = chemically synthesized
  source 1..22: mol_type = other DNA
tttattatttatttatttattt

SEQ ID NO: 64612 - DNA, 22 bp, synthetic construct
  misc_feature 1..22: note = chemically synthesized
  source 1..22: mol_type = other DNA
attatttatttatttatttttg

SEQ ID NO: 64613 - DNA, 22 bp, synthetic construct
  misc_feature 1..22: note = chemically synthesized
  source 1..22: mol_type = other DNA
ttatttatttatttatttttgt

SEQ ID NO: 64614 - DNA, 22 bp, synthetic construct
  misc_feature 1..22: note = chemically synthesized
  source 1..22: mol_type = other DNA
tttatttatttatttttgtaga

SEQ ID NO: 64615 - DNA, 22 bp, synthetic construct
  misc_feature 1..22: note = chemically synthesized
  source 1..22: mol_type = other DNA
atttatttatttttgtagaaac

SEQ ID NO: 64616 - DNA, 22 bp, synthetic construct
  misc_feature 1..22: note = chemically synthesized
  source 1..22: mol_type = other DNA
tttatttatttttgtagaaacg

SEQ ID NO: 64617 - DNA, 22 bp, synthetic construct
  misc_feature 1..22: note = chemically synthesized
  source 1..22: mol_type = other DNA
atttatttttgtagaaacgggg

SEQ ID NO: 64618 - DNA, 22 bp, synthetic construct
  misc_feature 1..22: note = chemically synthesized
  source 1..22: mol_type = other DNA
tttatttttgtagaaacggggt

SEQ ID NO: 64619 - DNA, 22 bp, synthetic construct
  misc_feature 1..22: note = chemically synthesized
  source 1..22: mol_type = other DNA
atttttgtagaaacggggtctc

SEQ ID NO: 64620 - DNA, 22 bp, synthetic construct
  misc_feature 1..22: note = chemically synthesized
  source 1..22: mol_type = other DNA
tttttgtagaaacggggtctca

SEQ ID NO: 64621 - DNA, 22 bp, synthetic construct
  misc_feature 1..22: note = chemically synthesized
  source 1..22: mol_type = other DNA
ttgtagaaacggggtctcacta

SEQ ID NO: 64622 - DNA, 22 bp, synthetic construct
  misc_feature 1..22: note = chemically synthesized
  source 1..22: mol_type = other DNA
tgtagaaacggggtctcactat

SEQ ID NO: 64623 - DNA, 22 bp, synthetic construct
  misc_feature 1..22: note = chemically synthesized
  source 1..22: mol_type = other DNA
gtagaaacggggtctcactatg

SEQ ID NO: 64624 - DNA, 22 bp, synthetic construct
  misc_feature 1..22: note = chemically synthesized
  source 1..22: mol_type = other DNA
tagaaacggggtctcactatgc

SEQ ID NO: 64625 - DNA, 22 bp, synthetic construct
  misc_feature 1..22: note = chemically synthesized
  source 1..22: mol_type = other DNA
actatgcggcccaggctggtct

SEQ ID NO: 64626 - DNA, 22 bp, synthetic construct
  misc_feature 1..22: note = chemically synthesized
  source 1..22: mol_type = other DNA
tgcggcccaggctggtctcaaa

SEQ ID NO: 64627 - DNA, 22 bp, synthetic construct
  misc_feature 1..22: note = chemically synthesized
  source 1..22: mol_type = other DNA
gtctcaaattcctggcttcaag

SEQ ID NO: 64628 - DNA, 22 bp, synthetic construct
  misc_feature 1..22: note = chemically synthesized
  source 1..22: mol_type = other DNA
aaattcctggcttcaagtgatc

SEQ ID NO: 64629 - DNA, 22 bp, synthetic construct
  misc_feature 1..22: note = chemically synthesized
  source 1..22: mol_type = other DNA
ctggcttcaagtgatcctcccg

SEQ ID NO: 64630 - DNA, 22 bp, synthetic construct
  misc_feature 1..22: note = chemically synthesized
  source 1..22: mol_type = other DNA
gcttcaagtgatcctcccgcct

SEQ ID NO: 64631 - DNA, 22 bp, synthetic construct
  misc_feature 1..22: note = chemically synthesized
  source 1..22: mol_type = other DNA
caagtgatcctcccgcctcaac

SEQ ID NO: 64632 - DNA, 22 bp, synthetic construct
  misc_feature 1..22: note = chemically synthesized
  source 1..22: mol_type = other DNA
aagtgatcctcccgcctcaacc

SEQ ID NO: 64633 - DNA, 22 bp, synthetic construct
  misc_feature 1..22: note = chemically synthesized
  source 1..22: mol_type = other DNA
ccgcctcaacctagcaaagcat

SEQ ID NO: 64634 - DNA, 22 bp, synthetic construct
  misc_feature 1..22: note = chemically synthesized
  source 1..22: mol_type = other DNA
aacctagcaaagcattgggatt

SEQ ID NO: 64635 - DNA, 22 bp, synthetic construct
  misc_feature 1..22: note = chemically synthesized
  source 1..22: mol_type = other DNA
gcaaagcattgggattacaggc

SEQ ID NO: 64636 - DNA, 22 bp, synthetic construct
  misc_feature 1..22: note = chemically synthesized
  source 1..22: mol_type = other DNA
ggattacaggcatgagccactg

SEQ ID NO: 64637 - DNA, 22 bp, synthetic construct
  misc_feature 1..22: note = chemically synthesized
  source 1..22: mol_type = other DNA
caggcatgagccactgcctcca

SEQ ID NO: 64638 - DNA, 22 bp, synthetic construct
  misc_feature 1..22: note = chemically synthesized
  source 1..22: mol_type = other DNA
cctccaaattcatgcatttttt

SEQ ID NO: 64639 - DNA, 22 bp, synthetic construct
  misc_feature 1..22: note = chemically synthesized
  source 1..22: mol_type = other DNA
caaattcatgcattttttgagg

SEQ ID NO: 64640 - DNA, 22 bp, synthetic construct
  misc_feature 1..22: note = chemically synthesized
  source 1..22: mol_type = other DNA
atgcattttttgaggataagag

SEQ ID NO: 64641 - DNA, 22 bp, synthetic construct
  misc_feature 1..22: note = chemically synthesized
  source 1..22: mol_type = other DNA
tttgaggataagagccaggggg

SEQ ID NO: 64642 - DNA, 22 bp, synthetic construct
  misc_feature 1..22: note = chemically synthesized
  source 1..22: mol_type = other DNA
ttgaggataagagccaggggga

SEQ ID NO: 64643 - DNA, 22 bp, synthetic construct
  misc_feature 1..22: note = chemically synthesized
  source 1..22: mol_type = other DNA
tgaggataagagccagggggaa

SEQ ID NO: 64644 - DNA, 22 bp, synthetic construct
  misc_feature 1..22: note = chemically synthesized
  source 1..22: mol_type = other DNA
gaggataagagccagggggaat

SEQ ID NO: 64645 - DNA, 22 bp, synthetic construct
  misc_feature 1..22: note = chemically synthesized
  source 1..22: mol_type = other DNA
aggataagagccagggggaata

SEQ ID NO: 64646 - DNA, 22 bp, synthetic construct
  misc_feature 1..22: note = chemically synthesized
  source 1..22: mol_type = other DNA
aaaaacttgcctgaatttccca

SEQ ID NO: 64647 - DNA, 22 bp, synthetic construct
  misc_feature 1..22: note = chemically synthesized
  source 1..22: mol_type = other DNA
aaaacttgcctgaatttcccat

SEQ ID NO: 64648 - DNA, 22 bp, synthetic construct
  misc_feature 1..22: note = chemically synthesized
  source 1..22: mol_type = other DNA
gcctgaatttcccatcattaag

SEQ ID NO: 64649 - DNA, 22 bp, synthetic construct
  misc_feature 1..22: note = chemically synthesized
  source 1..22: mol_type = other DNA
cctgaatttcccatcattaagt

SEQ ID NO: 64650 - DNA, 22 bp, synthetic construct
  misc_feature 1..22: note = chemically synthesized
  source 1..22: mol_type = other DNA
aatttcccatcattaagtccat

SEQ ID NO: 64651 - DNA, 22 bp, synthetic construct
  misc_feature 1..22: note = chemically synthesized
  source 1..22: mol_type = other DNA
cccatcattaagtccatattga

SEQ ID NO: 64652 - DNA, 22 bp, synthetic construct
  misc_feature 1..22: note = chemically synthesized
  source 1..22: mol_type = other DNA
ccatcattaagtccatattgac

SEQ ID NO: 64653 - DNA, 22 bp, synthetic construct
  misc_feature 1..22: note = chemically synthesized
  source 1..22: mol_type = other DNA
agtccatattgacatgtaaggg

SEQ ID NO: 64654 - DNA, 22 bp, synthetic construct
  misc_feature 1..22: note = chemically synthesized
  source 1..22: mol_type = other DNA
acatgtaaggggtagctgggga

SEQ ID NO: 64655 - DNA, 22 bp, synthetic construct
  misc_feature 1..22: note = chemically synthesized
  source 1..22: mol_type = other DNA
gggacagaaaaaagaaactcag

SEQ ID NO: 64656 - DNA, 22 bp, synthetic construct
  misc_feature 1..22: note = chemically synthesized
  source 1..22: mol_type = other DNA
agagctaatgaatctgtggcaa

SEQ ID NO: 64657 - DNA, 22 bp, synthetic construct
  misc_feature 1..22: note = chemically synthesized
  source 1..22: mol_type = other DNA
atgaatctgtggcaaaagttga

SEQ ID NO: 64658 - DNA, 22 bp, synthetic construct
  misc_feature 1..22: note = chemically synthesized
  source 1..22: mol_type = other DNA
tggcaaaagttgacagcattcc

SEQ ID NO: 64659 - DNA, 22 bp, synthetic construct
  misc_feature 1..22: note = chemically synthesized
  source 1..22: mol_type = other DNA
acagcattccatgctggaaatg

SEQ ID NO: 64660 - DNA, 22 bp, synthetic construct
  misc_feature 1..22: note = chemically synthesized
  source 1..22: mol_type = other DNA
catgctggaaatgattaaaaca

SEQ ID NO: 64661 - DNA, 22 bp, synthetic construct
  misc_feature 1..22: note = chemically synthesized
  source 1..22: mol_type = other DNA
gaaatgattaaaacatcctcca

SEQ ID NO: 64662 - DNA, 22 bp, synthetic construct
  misc_feature 1..22: note = chemically synthesized
  source 1..22: mol_type = other DNA
aaacatcctccaggaggtatga

SEQ ID NO: 64663 - DNA, 22 bp, synthetic construct
  misc_feature 1..22: note = chemically synthesized
  source 1..22: mol_type = other DNA
caggaggtatgacctggagtct

SEQ ID NO: 64664 - DNA, 22 bp, synthetic construct
  misc_feature 1..22: note = chemically synthesized
  source 1..22: mol_type = other DNA
gagtctcctccccaccccacca

SEQ ID NO: 64665 - DNA, 22 bp, synthetic construct
  misc_feature 1..22: note = chemically synthesized
  source 1..22: mol_type = other DNA
ctccccaccccaccaagggctc

SEQ ID NO: 64666 - DNA, 22 bp, synthetic construct
  misc_feature 1..22: note = chemically synthesized
  source 1..22: mol_type = other DNA
cccaccccaccaagggctcgca

SEQ ID NO: 64667 - DNA, 22 bp, synthetic construct
  misc_feature 1..22: note = chemically synthesized
  source 1..22: mol_type = other DNA
gcacccagcccatgctgactcc

SEQ ID NO: 64668 - DNA, 22 bp, synthetic construct
  misc_feature 1..22: note = chemically synthesized
  source 1..22: mol_type = other DNA
actccagttgtccttgactgca

SEQ ID NO: 64669 - DNA, 22 bp, synthetic construct
  misc_feature 1..22: note = chemically synthesized
  source 1..22: mol_type = other DNA
cagttgtccttgactgcatggt

SEQ ID NO: 64670 - DNA, 22 bp, synthetic construct
  misc_feature 1..22: note = chemically synthesized
  source 1..22: mol_type = other DNA
tccttgactgcatggtttctgc

SEQ ID NO: 64671 - DNA, 22 bp, synthetic construct
  misc_feature 1..22: note = chemically synthesized
  source 1..22: mol_type = other DNA
gactgcatggtttctgctggtc

SEQ ID NO: 64672 - DNA, 22 bp, synthetic construct
  misc_feature 1..22: note = chemically synthesized
  source 1..22: mol_type = other DNA
actgcatggtttctgctggtcc

SEQ ID NO: 64673 - DNA, 22 bp, synthetic construct
  misc_feature 1..22: note = chemically synthesized
  source 1..22: mol_type = other DNA
catggtttctgctggtccaagc

SEQ ID NO: 64674 - DNA, 22 bp, synthetic construct
  misc_feature 1..22: note = chemically synthesized
  source 1..22: mol_type = other DNA
ctgctggtccaagcaaacttct

SEQ ID NO: 64675 - DNA, 22 bp, synthetic construct
  misc_feature 1..22: note = chemically synthesized
  source 1..22: mol_type = other DNA
tgctggtccaagcaaacttctc

SEQ ID NO: 64676 - DNA, 22 bp, synthetic construct
  misc_feature 1..22: note = chemically synthesized
  source 1..22: mol_type = other DNA
ctggtccaagcaaacttctcct

SEQ ID NO: 64677 - DNA, 22 bp, synthetic construct
  misc_feature 1..22: note = chemically synthesized
  source 1..22: mol_type = other DNA
gtccaagcaaacttctcctgcc

SEQ ID NO: 64678 - DNA, 22 bp, synthetic construct
  misc_feature 1..22: note = chemically synthesized
  source 1..22: mol_type = other DNA
ctcctgccacgcctaaccttgg

SEQ ID NO: 64679 - DNA, 22 bp, synthetic construct
  misc_feature 1..22: note = chemically synthesized
  source 1..22: mol_type = other DNA
tcctgccacgcctaaccttgga

SEQ ID NO: 64680 - DNA, 22 bp, synthetic construct
  misc_feature 1..22: note = chemically synthesized
  source 1..22: mol_type = other DNA
ctgccacgcctaaccttggaga

SEQ ID NO: 64681 - DNA, 22 bp, synthetic construct
  misc_feature 1..22: note = chemically synthesized
  source 1..22: mol_type = other DNA
ccacgcctaaccttggagagca

SEQ ID NO: 64682 - DNA, 22 bp, synthetic construct
  misc_feature 1..22: note = chemically synthesized
  source 1..22: mol_type = other DNA
accttggagagcaggtaatgtg

SEQ ID NO: 64683 - DNA, 22 bp, synthetic construct
  misc_feature 1..22: note = chemically synthesized
  source 1..22: mol_type = other DNA
ggagagcaggtaatgtgttggt

SEQ ID NO: 64684 - DNA, 22 bp, synthetic construct
  misc_feature 1..22: note = chemically synthesized
  source 1..22: mol_type = other DNA
gagagcaggtaatgtgttggtg

SEQ ID NO: 64685 - DNA, 22 bp, synthetic construct
  misc_feature 1..22: note = chemically synthesized
  source 1..22: mol_type = other DNA
gtgactgtgggtgggtgtaaag

SEQ ID NO: 64686 - DNA, 22 bp, synthetic construct
  misc_feature 1..22: note = chemically synthesized
  source 1..22: mol_type = other DNA
tgggtgggtgtaaagtaagccc

SEQ ID NO: 64687 - DNA, 22 bp, synthetic construct
  misc_feature 1..22: note = chemically synthesized
  source 1..22: mol_type = other DNA
gggcgtggggtatatgtgatct

SEQ ID NO: 64688 - DNA, 22 bp, synthetic construct
  misc_feature 1..22: note = chemically synthesized
  source 1..22: mol_type = other DNA
cactgtcagggctgctgggcca

SEQ ID NO: 64689 - DNA, 22 bp, synthetic construct
  misc_feature 1..22: note = chemically synthesized
  source 1..22: mol_type = other DNA
tcagggctgctgggccataggt

SEQ ID NO: 64690 - DNA, 22 bp, synthetic construct
  misc_feature 1..22: note = chemically synthesized
  source 1..22: mol_type = other DNA
ctgggccataggtagggagcct

SEQ ID NO: 64691 - DNA, 22 bp, synthetic construct
  misc_feature 1..22: note = chemically synthesized
  source 1..22: mol_type = other DNA
ggccataggtagggagcctccc

SEQ ID NO: 64692 - DNA, 22 bp, synthetic construct
  misc_feature 1..22: note = chemically synthesized
  source 1..22: mol_type = other DNA
cctctacccagataagcctctg

SEQ ID NO: 64693 - DNA, 22 bp, synthetic construct
  misc_feature 1..22: note = chemically synthesized
  source 1..22: mol_type = other DNA
tacccagataagcctctgttgt

SEQ ID NO: 64694 - DNA, 22 bp, synthetic construct
  misc_feature 1..22: note = chemically synthesized
  source 1..22: mol_type = other DNA
cccagataagcctctgttgtgg

SEQ ID NO: 64695 - DNA, 22 bp, synthetic construct
  misc_feature 1..22: note = chemically synthesized
  source 1..22: mol_type = other DNA
tgttgtggagtaactattgcag

SEQ ID NO: 64696 - DNA, 22 bp, synthetic construct
  misc_feature 1..22: note = chemically synthesized
  source 1..22: mol_type = other DNA
ttgtggagtaactattgcagtg

SEQ ID NO: 64697 - DNA, 22 bp, synthetic construct
  misc_feature 1..22: note = chemically synthesized
  source 1..22: mol_type = other DNA
tggagtaactattgcagtgacc

SEQ ID NO: 64698 - DNA, 22 bp, synthetic construct
  misc_feature 1..22: note = chemically synthesized
  source 1..22: mol_type = other DNA
ttgcagtgacctctgggatgag

SEQ ID NO: 64699 - DNA, 22 bp, synthetic construct
  misc_feature 1..22: note = chemically synthesized
  source 1..22: mol_type = other DNA
cagtgacctctgggatgagagt

SEQ ID NO: 64700 - DNA, 22 bp, synthetic construct
  misc_feature 1..22: note = chemically synthesized
  source 1..22: mol_type = other DNA
tgggatgagagtttctatggtc

SEQ ID NO: 64701 - DNA, 22 bp, synthetic construct
  misc_feature 1..22: note = chemically synthesized
  source 1..22: mol_type = other DNA
ggatgagagtttctatggtcag

SEQ ID NO: 64702 - DNA, 22 bp, synthetic construct
  misc_feature 1..22: note = chemically synthesized
  source 1..22: mol_type = other DNA
ctatggtcagaggtgagtcaag

SEQ ID NO: 64703 - DNA, 22 bp, synthetic construct
  misc_feature 1..22: note = chemically synthesized
  source 1..22: mol_type = other DNA
tatggtcagaggtgagtcaagg

SEQ ID NO: 64704 - DNA, 22 bp, synthetic construct
  misc_feature 1..22: note = chemically synthesized
  source 1..22: mol_type = other DNA
tggtcagaggtgagtcaaggtg

SEQ ID NO: 64705 - DNA, 22 bp, synthetic construct
  misc_feature 1..22: note = chemically synthesized
  source 1..22: mol_type = other DNA
aaaacatatacaaaggccactg

SEQ ID NO: 64706 - DNA, 22 bp, synthetic construct
  misc_feature 1..22: note = chemically synthesized
  source 1..22: mol_type = other DNA
tctgggtcatgccagggcagct

SEQ ID NO: 64707 - DNA, 22 bp, synthetic construct
  misc_feature 1..22: note = chemically synthesized
  source 1..22: mol_type = other DNA
ggtcatgccagggcagctagca

SEQ ID NO: 64708 - DNA, 22 bp, synthetic construct
  misc_feature 1..22: note = chemically synthesized
  source 1..22: mol_type = other DNA
gcagccagggtctctgagttgg

SEQ ID NO: 64709 - DNA, 22 bp, synthetic construct
  misc_feature 1..22: note = chemically synthesized
  source 1..22: mol_type = other DNA
tgagttgggaggggttctatta

SEQ ID NO: 64710 - DNA, 22 bp, synthetic construct
  misc_feature 1..22: note = chemically synthesized
  source 1..22: mol_type = other DNA
agttgggaggggttctattatg

SEQ ID NO: 64711 - DNA, 22 bp, synthetic construct
  misc_feature 1..22: note = chemically synthesized
  source 1..22: mol_type = other DNA
ggaggggttctattatgtggtc

SEQ ID NO: 64712 - DNA, 22 bp, synthetic construct
  misc_feature 1..22: note = chemically synthesized
  source 1..22: mol_type = other DNA
tattatgtggtcagcatatggg

SEQ ID NO: 64713 - DNA, 22 bp, synthetic construct
  misc_feature 1..22: note = chemically synthesized
  source 1..22: mol_type = other DNA
ttatgtggtcagcatatgggga

SEQ ID NO: 64714 - DNA, 22 bp, synthetic construct
  misc_feature 1..22: note = chemically synthesized
  source 1..22: mol_type = other DNA
tgtggtcagcatatggggaggg

SEQ ID NO: 64715 - DNA, 22 bp, synthetic construct
  misc_feature 1..22: note = chemically synthesized
  source 1..22: mol_type = other DNA
ttttctgagacgcctcaggaag

SEQ ID NO: 64716 - DNA, 22 bp, synthetic construct
  misc_feature 1..22: note = chemically synthesized
  source 1..22: mol_type = other DNA
tctgagacgcctcaggaagaat

SEQ ID NO: 64717 - DNA, 22 bp, synthetic construct
  misc_feature 1..22: note = chemically synthesized
  source 1..22: mol_type = other DNA
ctgagacgcctcaggaagaata

SEQ ID NO: 64718 - DNA, 22 bp, synthetic construct
  misc_feature 1..22: note = chemically synthesized
  source 1..22: mol_type = other DNA
tgagacgcctcaggaagaatac

SEQ ID NO: 64719 - DNA, 22 bp, synthetic construct
  misc_feature 1..22: note = chemically synthesized
  source 1..22: mol_type = other DNA
agacgcctcaggaagaataccc

SEQ ID NO: 64720 - DNA, 22 bp, synthetic construct
  misc_feature 1..22: note = chemically synthesized
  source 1..22: mol_type = other DNA
aggaagaatacccctatggata

SEQ ID NO: 64721 - DNA, 22 bp, synthetic construct
  misc_feature 1..22: note = chemically synthesized
  source 1..22: mol_type = other DNA
tggataaggagttgataagtga

SEQ ID NO: 64722 - DNA, 22 bp, synthetic construct
  misc_feature 1..22: note = chemically synthesized
  source 1..22: mol_type = other DNA
ataagtgatggagttgacatcc

SEQ ID NO: 64723 - DNA, 22 bp, synthetic construct
  misc_feature 1..22: note = chemically synthesized
  source 1..22: mol_type = other DNA
acatcccactctgggcatccag

SEQ ID NO: 64724 - DNA, 22 bp, synthetic construct
  misc_feature 1..22: note = chemically synthesized
  source 1..22: mol_type = other DNA
tgggcatccagggacagtggga

SEQ ID NO: 64725 - DNA, 22 bp, synthetic construct
  misc_feature 1..22: note = chemically synthesized
  source 1..22: mol_type = other DNA
ggcatccagggacagtgggagt

SEQ ID NO: 64726 - DNA, 22 bp, synthetic construct
  misc_feature 1..22: note = chemically synthesized
  source 1..22: mol_type = other DNA
cctggcggtgggccaccaggca

SEQ ID NO: 64727 - DNA, 22 bp, synthetic construct
  misc_feature 1..22: note = chemically synthesized
  source 1..22: mol_type = other DNA
ctggcggtgggccaccaggcag

SEQ ID NO: 64728 - DNA, 22 bp, synthetic construct
  misc_feature 1..22: note = chemically synthesized
  source 1..22: mol_type = other DNA
gcggtgggccaccaggcagggg

SEQ ID NO: 64729 - DNA, 22 bp, synthetic construct
  misc_feature 1..22: note = chemically synthesized
  source 1..22: mol_type = other DNA
tggatcagagcaacctcatagt

SEQ ID NO: 64730 - DNA, 22 bp, synthetic construct
  misc_feature 1..22: note = chemically synthesized
  source 1..22: mol_type = other DNA
gatcagagcaacctcatagtca

SEQ ID NO: 64731 - DNA, 22 bp, synthetic construct
  misc_feature 1..22: note = chemically synthesized
  source 1..22: mol_type = other DNA
atagtcatgagacgatgagctg

SEQ ID NO: 64732 - DNA, 22 bp, synthetic construct
  misc_feature 1..22: note = chemically synthesized
  source 1..22: mol_type = other DNA
gtcctcatctttccacctgcca

SEQ ID NO: 64733 - DNA, 22 bp, synthetic construct
  misc_feature 1..22: note = chemically synthesized
  source 1..22: mol_type = other DNA
atctttccacctgccagcccct

SEQ ID NO: 64734 - DNA, 22 bp, synthetic construct
  misc_feature 1..22: note = chemically synthesized
  source 1..22: mol_type = other DNA
tccacctgccagcccctttctg

SEQ ID NO: 64735 - DNA, 22 bp, synthetic construct
  misc_feature 1..22: note = chemically synthesized
  source 1..22: mol_type = other DNA
ccacctgccagcccctttctgc

SEQ ID NO: 64736 - DNA, 22 bp, synthetic construct
  misc_feature 1..22: note = chemically synthesized
  source 1..22: mol_type = other DNA
cacctgccagcccctttctgct

SEQ ID NO: 64737 - DNA, 22 bp, synthetic construct
  misc_feature 1..22: note = chemically synthesized
  source 1..22: mol_type = other DNA
ccagcccctttctgcttcctcc

SEQ ID NO: 64738 - DNA, 22 bp, synthetic construct
  misc_feature 1..22: note = chemically synthesized
  source 1..22: mol_type = other DNA
tctgcttcctccagcacgtttt

SEQ ID NO: 64739 - DNA, 22 bp, synthetic construct
  misc_feature 1..22: note = chemically synthesized
  source 1..22: mol_type = other DNA
ctgcttcctccagcacgttttt

SEQ ID NO: 64740 - DNA, 22 bp, synthetic construct
  misc_feature 1..22: note = chemically synthesized
  source 1..22: mol_type = other DNA
tgcttcctccagcacgttttta

SEQ ID NO: 64741 - DNA, 22 bp, synthetic construct
  misc_feature 1..22: note = chemically synthesized
  source 1..22: mol_type = other DNA
cttcctccagcacgtttttatc

SEQ ID NO: 64742 - DNA, 22 bp, synthetic construct
  misc_feature 1..22: note = chemically synthesized
  source 1..22: mol_type = other DNA
cctccagcacgtttttatccgt

SEQ ID NO: 64743 - DNA, 22 bp, synthetic construct
  misc_feature 1..22: note = chemically synthesized
  source 1..22: mol_type = other DNA
ctccagcacgtttttatccgtg

SEQ ID NO: 64744 - DNA, 22 bp, synthetic construct
  misc_feature 1..22: note = chemically synthesized
  source 1..22: mol_type = other DNA
cagcacgtttttatccgtggga

SEQ ID NO: 64745 - DNA, 22 bp, synthetic construct
  misc_feature 1..22: note = chemically synthesized
  source 1..22: mol_type = other DNA
ttatccgtgggaaaacaggtga

SEQ ID NO: 64746 - DNA, 22 bp, synthetic construct
  misc_feature 1..22: note = chemically synthesized
  source 1..22: mol_type = other DNA
tatccgtgggaaaacaggtgag

SEQ ID NO: 64747 - DNA, 22 bp, synthetic construct
  misc_feature 1..22: note = chemically synthesized
  source 1..22: mol_type = other DNA
atccgtgggaaaacaggtgagg

SEQ ID NO: 64748 - DNA, 22 bp, synthetic construct
  misc_feature 1..22: note = chemically synthesized
  source 1..22: mol_type = other DNA
tccgtgggaaaacaggtgaggc

SEQ ID NO: 64749 - DNA, 22 bp, synthetic construct
  misc_feature 1..22: note = chemically synthesized
  source 1..22: mol_type = other DNA
gttagaaagctgactgcatcga

SEQ ID NO: 64750 - DNA, 22 bp, synthetic construct
  misc_feature 1..22: note = chemically synthesized
  source 1..22: mol_type = other DNA
ttagaaagctgactgcatcgag

SEQ ID NO: 64751 - DNA, 22 bp, synthetic construct
  misc_feature 1..22: note = chemically synthesized
  source 1..22: mol_type = other DNA
gaaagctgactgcatcgagaca

SEQ ID NO: 64752 - DNA, 22 bp, synthetic construct
  misc_feature 1..22: note = chemically synthesized
  source 1..22: mol_type = other DNA
actgcatcgagacaccgtggat

SEQ ID NO: 64753 - DNA, 22 bp, synthetic construct
  misc_feature 1..22: note = chemically synthesized
  source 1..22: mol_type = other DNA
catcgagacaccgtggattctc

SEQ ID NO: 64754 - DNA, 22 bp, synthetic construct
  misc_feature 1..22: note = chemically synthesized
  source 1..22: mol_type = other DNA
tcaaaggtcttgtggatatatg

SEQ ID NO: 64755 - DNA, 22 bp, synthetic construct
  misc_feature 1..22: note = chemically synthesized
  source 1..22: mol_type = other DNA
aaaggtcttgtggatatatgag

SEQ ID NO: 64756 - DNA, 22 bp, synthetic construct
  misc_feature 1..22: note = chemically synthesized
  source 1..22: mol_type = other DNA
gtggatatatgaggcgagtggc

SEQ ID NO: 64757 - DNA, 22 bp, synthetic construct
  misc_feature 1..22: note = chemically synthesized
  source 1..22: mol_type = other DNA
tggatatatgaggcgagtggct

SEQ ID NO: 64758 - DNA, 22 bp, synthetic construct
  misc_feature 1..22: note = chemically synthesized
  source 1..22: mol_type = other DNA
gaagttttgctgagaatccact

SEQ ID NO: 64759 - DNA, 22 bp, synthetic construct
  misc_feature 1..22: note = chemically synthesized
  source 1..22: mol_type = other DNA
tgctgagaatccactcatttat

SEQ ID NO: 64760 - DNA, 22 bp, synthetic construct
  misc_feature 1..22: note = chemically synthesized
  source 1..22: mol_type = other DNA
gctgagaatccactcatttatc

SEQ ID NO: 64761 - DNA, 22 bp, synthetic construct
  misc_feature 1..22: note = chemically synthesized
  source 1..22: mol_type = other DNA
ctgagaatccactcatttatct

SEQ ID NO: 64762 - DNA, 22 bp, synthetic construct
  misc_feature 1..22: note = chemically synthesized
  source 1..22: mol_type = other DNA
agaatccactcatttatctgtt

SEQ ID NO: 64763 - DNA, 22 bp, synthetic construct
  misc_feature 1..22: note = chemically synthesized
  source 1..22: mol_type = other DNA
atttatctgtttatttgagacg

SEQ ID NO: 64764 - DNA, 22 bp, synthetic construct
  misc_feature 1..22: note = chemically synthesized
  source 1..22: mol_type = other DNA
atctgtttatttgagacggggt

SEQ ID NO: 64765 - DNA, 22 bp, synthetic construct
  misc_feature 1..22: note = chemically synthesized
  source 1..22: mol_type = other DNA
tctgtttatttgagacggggtc

SEQ ID NO: 64766 - DNA, 22 bp, synthetic construct
  misc_feature 1..22: note = chemically synthesized
  source 1..22: mol_type = other DNA
tttatttgagacggggtctcac

SEQ ID NO: 64767 - DNA, 22 bp, synthetic construct
  misc_feature 1..22: note = chemically synthesized
  source 1..22: mol_type = other DNA
atttgagacggggtctcactct

SEQ ID NO: 64768 - DNA, 22 bp, synthetic construct
  misc_feature 1..22: note = chemically synthesized
  source 1..22: mol_type = other DNA
tttgagacggggtctcactctg

SEQ ID NO: 64769 - DNA, 22 bp, synthetic construct
  misc_feature 1..22: note = chemically synthesized
  source 1..22: mol_type = other DNA
gagacggggtctcactctgtta

SEQ ID NO: 64770 - DNA, 22 bp, synthetic construct
  misc_feature 1..22: note = chemically synthesized
  source 1..22: mol_type = other DNA
agacggggtctcactctgttac

SEQ ID NO: 64771 - DNA, 22 bp, synthetic construct
  misc_feature 1..22: note = chemically synthesized
  source 1..22: mol_type = other DNA
actctgttacccaggctggagt

SEQ ID NO: 64772 - DNA, 22 bp, synthetic construct
  misc_feature 1..22: note = chemically synthesized
  source 1..22: mol_type = other DNA
tgttacccaggctggagtgcgg

SEQ ID NO: 64773 - DNA, 22 bp, synthetic construct
  misc_feature 1..22: note = chemically synthesized
  source 1..22: mol_type = other DNA
ttacccaggctggagtgcggtg

SEQ ID NO: 64774 - DNA, 22 bp, synthetic construct
  misc_feature 1..22: note = chemically synthesized
  source 1..22: mol_type = other DNA
cccaggctggagtgcggtggca

SEQ ID NO: 64775 - DNA, 22 bp, synthetic construct
  misc_feature 1..22: note = chemically synthesized
  source 1..22: mol_type = other DNA
gagtgcggtggcaccatcacag

SEQ ID NO: 64776 - DNA, 22 bp, synthetic construct
  misc_feature 1..22: note = chemically synthesized
  source 1..22: mol_type = other DNA
actgcagcctcagtctcctggg

SEQ ID NO: 64777 - DNA, 22 bp, synthetic construct
  misc_feature 1..22: note = chemically synthesized
  source 1..22: mol_type = other DNA
cagcctcagtctcctgggctta

SEQ ID NO: 64778 - DNA, 22 bp, synthetic construct
  misc_feature 1..22: note = chemically synthesized
  source 1..22: mol_type = other DNA
agtctcctgggcttaagggatc

SEQ ID NO: 64779 - DNA, 22 bp, synthetic construct
  misc_feature 1..22: note = chemically synthesized
  source 1..22: mol_type = other DNA
ctgggcttaagggatcgttttg

SEQ ID NO: 64780 - DNA, 22 bp, synthetic construct
  misc_feature 1..22: note = chemically synthesized
  source 1..22: mol_type = other DNA
ggcttaagggatcgttttgcat

SEQ ID NO: 64781 - DNA, 22 bp, synthetic construct
  misc_feature 1..22: note = chemically synthesized
  source 1..22: mol_type = other DNA
aagggatcgttttgcatcagtc

SEQ ID NO: 64782 - DNA, 22 bp, synthetic construct
  misc_feature 1..22: note = chemically synthesized
  source 1..22: mol_type = other DNA
agggatcgttttgcatcagtct

SEQ ID NO: 64783 - DNA, 22 bp, synthetic construct
  misc_feature 1..22: note = chemically synthesized
  source 1..22: mol_type = other DNA
tgcatcagtctctgggtagctg

SEQ ID NO: 64784 - DNA, 22 bp, synthetic construct
  misc_feature 1..22: note = chemically synthesized
  source 1..22: mol_type = other DNA
gcatcagtctctgggtagctgg

SEQ ID NO: 64785 - DNA, 22 bp, synthetic construct
  misc_feature 1..22: note = chemically synthesized
  source 1..22: mol_type = other DNA
catcagtctctgggtagctggg

SEQ ID NO: 64786 - DNA, 22 bp, synthetic construct
  misc_feature 1..22: note = chemically synthesized
  source 1..22: mol_type = other DNA
tgggtagctgggcctacaggcg

SEQ ID NO: 64787 - DNA, 22 bp, synthetic construct
  misc_feature 1..22: note = chemically synthesized
  source 1..22: mol_type = other DNA
ggtagctgggcctacaggcgca

SEQ ID NO: 64788 - DNA, 22 bp, synthetic construct
  misc_feature 1..22: note = chemically synthesized
  source 1..22: mol_type = other DNA
ggcctacaggcgcacaccacca

SEQ ID NO: 64789 - DNA, 22 bp, synthetic construct
  misc_feature 1..22: note = chemically synthesized
  source 1..22: mol_type = other DNA
caggcgcacaccaccaaaccca

SEQ ID NO: 64790 - skipped

SEQ ID NO: 64791 - protein, 9 aa, synthetic construct
  REGION 1..9: note = chemically synthesized
LAGLIDADG

SEQ ID NO: 64792 - DNA, 20 bp, synthetic construct
  misc_feature 1..20: note = Synthetic
  source 1..20: mol_type = other DNA
attggccctgctgagtacat

SEQ ID NO: 64793 - DNA, 24 bp, synthetic construct
  misc_feature 1..24: note = Synthetic
  source 1..24: mol_type = other DNA
cccaggaggtagaggtcacaatga

SEQ ID NO: 64794 - DNA, 18 bp, synthetic construct
  misc_feature 1..18: note = Synthetic
  source 1..18: mol_type = other DNA
aacctgggcacgctcttt

SEQ ID NO: 64795 - DNA, 20 bp, synthetic construct
  misc_feature 1..20: note = Synthetic
  source 1..20: mol_type = other DNA
atagcctggggaaagcaact

SEQ ID NO: 64796 - DNA, 20 bp, synthetic construct
  misc_feature 1..20: note = Synthetic
  source 1..20: mol_type = other DNA
agaggaccacctgagctgac

SEQ ID NO: 64797 - DNA, 22 bp, synthetic construct
  misc_feature 1..22: note = Synthetic
  source 1..22: mol_type = other DNA
tgtaaaagaggaccacctgagc

SEQ ID NO: 64798 - DNA, 20 bp, synthetic construct
  misc_feature 1..20: note = Synthetic
  source 1..20: mol_type = other DNA
actgtccaaagagaatccta

SEQ ID NO: 64799 - DNA, 20 bp, synthetic construct
  misc_feature 1..20: note = Synthetic
  source 1..20: mol_type = other DNA
tctttggacagtgtccatac

SEQ ID NO: 64800 - DNA, 20 bp, synthetic construct
  misc_feature 1..20: note = Synthetic
  source 1..20: mol_type = other DNA
ttggacagtgtccatactgg

SEQ ID NO: 64801 - DNA, 20 bp, synthetic construct
  misc_feature 1..20: note = Synthetic
  source 1..20: mol_type = other DNA
tggacagtgtccatactggt

SEQ ID NO: 64802 - DNA, 20 bp, synthetic construct
  misc_feature 1..20: note = Synthetic
  source 1..20: mol_type = other DNA
ctactgcctcgcctaggtcc

SEQ ID NO: 64803 - DNA, 20 bp, synthetic construct
  misc_feature 1..20: note = Synthetic
  source 1..20: mol_type = other DNA
catcccctactgcctcgcct

SEQ ID NO: 64804 - DNA, 20 bp, synthetic construct
  misc_feature 1..20: note = Synthetic
  source 1..20: mol_type = other DNA
tactgcctcgcctaggtcct

SEQ ID NO: 64805 - DNA, 20 bp, synthetic construct
  misc_feature 1..20: note = Synthetic
  source 1..20: mol_type = other DNA
aggacctaggcgaggcagta

SEQ ID NO: 64806 - DNA, 20 bp, synthetic construct
  misc_feature 1..20: note = Synthetic
  source 1..20: mol_type = other DNA
gctggcccaggacctaggcg

SEQ ID NO: 64807 - DNA, 20 bp, synthetic construct
  misc_feature 1..20: note = Synthetic
  source 1..20: mol_type = other DNA
caggacctaggcgaggcagt

SEQ ID NO: 64808 - DNA, 20 bp, synthetic construct
  misc_feature 1..20: note = Synthetic
  source 1..20: mol_type = other DNA
ggtgtccaaagagaatccta

SEQ ID NO: 64809 - DNA, 19 bp, synthetic construct
  misc_feature 1..19: note = Synthetic
  source 1..19: mol_type = other DNA
ctgtccaaagagaatccta

SEQ ID NO: 64810 - DNA, 19 bp, synthetic construct
  misc_feature 1..19: note = Synthetic
  source 1..19: mol_type = other DNA
gtgtccaaagagaatccta

SEQ ID NO: 64811 - DNA, 18 bp, synthetic construct
  misc_feature 1..18: note = Synthetic
  source 1..18: mol_type = other DNA
tgtccaaagagaatccta

SEQ ID NO: 64812 - DNA, 18 bp, synthetic construct
  misc_feature 1..18: note = Synthetic
  source 1..18: mol_type = other DNA
ggtccaaagagaatccta

SEQ ID NO: 64813 - DNA, 17 bp, synthetic construct
  misc_feature 1..17: note = Synthetic
  source 1..17: mol_type = other DNA
gtccaaagagaatccta

SEQ ID NO: 64814 - DNA, 20 bp, synthetic construct
  misc_feature 1..20: note = Synthetic
  source 1..20: mol_type = other DNA
gctttggacagcgtccatac

SEQ ID NO: 64815 - DNA, 20 bp, synthetic construct
  misc_feature 1..20: note = Synthetic
  source 1..20: mol_type = other DNA
ggtttggacagcgtccatac

SEQ ID NO: 64816 - DNA, 19 bp, synthetic construct
  misc_feature 1..19: note = Synthetic
  source 1..19: mol_type = other DNA
ctttggacagcgtccatac

SEQ ID NO: 64817 - DNA, 19 bp, synthetic construct
  misc_feature 1..19: note = Synthetic
  source 1..19: mol_type = other DNA
gtttggacagcgtccatac

SEQ ID NO: 64818 - DNA, 18 bp, synthetic construct
  misc_feature 1..18: note = Synthetic
  source 1..18: mol_type = other DNA
tttggacagcgtccatac

SEQ ID NO: 64819 - DNA, 18 bp, synthetic construct
  misc_feature 1..18: note = Synthetic
  source 1..18: mol_type = other DNA
gttggacagcgtccatac

SEQ ID NO: 64820 - DNA, 17 bp, synthetic construct
  misc_feature 1..17: note = Synthetic
  source 1..17: mol_type = other DNA
ttggacagcgtccatac

SEQ ID NO: 64821 - RNA, 100 nt, synthetic construct
  misc_feature 1..100: note = Synthetic
  modified_base 1..2: mod_base = other; note = linked by phosphorothioate linkage
  modified_base 1: mod_base = gm
  modified_base 2: mod_base = cm
  modified_base 2..3: mod_base = other; note = linked by phosphorothioate linkage
  modified_base 3..4: mod_base = um
  modified_base 3..4: mod_base = other; note = linked by phosphorothioate linkage
  modified_base 97..98: mod_base = other; note = linked by phosphorothioate linkage
  modified_base 98..99: mod_base = other; note = linked by phosphorothioate linkage
  modified_base 99..100: mod_base = other; note = linked by phosphorothioate linkage
  modified_base 99..100: mod_base = um
  source 1..100: mol_type = other RNA
gctgtccaaagagaatcctagttttagagctagaaatagcaagttaaaataaggctagtccgttatcaacttgaaaaagtggcaccgagtcggtgctttt

SEQ ID NO: 64822 - RNA, 36 nt, synthetic construct
  misc_feature 1..36: note = Synthetic
  modified_base 1..2: mod_base = other; note = linked by phosphorothioate linkage
  modified_base 1: mod_base = gm
  modified_base 2..3: mod_base = other; note = linked by phosphorothioate linkage
  modified_base 2: mod_base = cm
  modified_base 3..4: mod_base = other; note = linked by phosphorothioate linkage
  modified_base 3: mod_base = um
  modified_base 28: mod_base = gm
  modified_base 29: mod_base = cm
  modified_base 30: mod_base = um
  modified_base 31: mod_base = OTHER; note = 2'-O-methyl a
  source 1..36: mol_type = other RNA
gctgtccaaagagaatcctagttttagagctagaaa

SEQ ID NO: 64823 - RNA, 36 nt, synthetic construct; identical to SEQ ID NO: 64822
  misc_feature 1..36: note = Synthetic
  modified_base 1..2: mod_base = other; note = linked by phosphorothioate linkage
  modified_base 1: mod_base = gm
  modified_base 2..3: mod_base = other; note = linked by phosphorothioate linkage
  modified_base 2: mod_base = cm
  modified_base 3..4: mod_base = other; note = linked by phosphorothioate linkage
  modified_base 3: mod_base = um
  modified_base 21: mod_base = gm
  modified_base 22..25: mod_base = um
  modified_base 26: mod_base = OTHER; note = 2'-O-methyl a
  modified_base 27: mod_base = gm
  modified_base 28: mod_base = OTHER; note = 2'-O-methyl a
  modified_base 29: mod_base = gm
  modified_base 30: mod_base = cm
  modified_base 31: mod_base = um
  modified_base 32: mod_base = OTHER; note = 2'-O-methyl a
  modified_base 33: mod_base = gm
  modified_base 34..36: mod_base = OTHER; note = 2'-O-methyl a
  source 1..36: mol_type = other RNA

SEQ ID NO: 64824 - RNA, 36 nt, synthetic construct
  misc_feature 1..36: note = Synthetic
  modified_base 1..2: mod_base = other; note = linked by phosphorothioate linkage
  modified_base 2..3: mod_base = other; note = linked by phosphorothioate linkage
  modified_base 3..4: mod_base = other; note = linked by phosphorothioate linkage
  source 1..36: mol_type = other RNA
gctgtccaaagagaatcctagttttagagctatgct

SEQ ID NO: 64825 - DNA, 56 bp, synthetic construct
  misc_feature 1..56: note = Synthetic
  source 1..56: mol_type = other DNA
gtctcgtgggctcggagatgtgtataagagacagggcacggaagtgttgctgtagt

SEQ ID NO: 64826 - DNA, 55 bp, synthetic construct
  misc_feature 1..55: note = Synthetic
  source 1..55: mol_type = other DNA
tcgtcggcagcgtcagatgtgtataagagacagcccttctagaggcaacatgtga

SEQ ID NO: 64827 - protein, 357 aa, synthetic construct
  REGION 1..357: note = Synthetic
  VARIANT 347: note = X can be any naturally occurring amino acid
MEEGMNVLHDFGIQSTHYLQVNYQDSQDWFILVSVIADLRNAFYVLFPIWFHLQEAVGIKLLWVAVIGDWLNLVFKWILFGQRPYWWVLDTDYYSNTSVPLIKQFPVTCETGPGSPSGHAMGTAGVYYVMVTSTLSIFQGKIKPTYRFRCLNVILWLGFWAVQLNVCLSRIYLAAHFPHQVVAGVLSGIAVAETFSHIHSIYNASLKKYFLITFFLFSFAIGFYLLLKGLGVDLLWTLEKAQRWCEQPEWVHIDTTPFASLLKNLGTLFGLGLALNSSMYRESCKGKLSKWLPFRLSSIVASLVLLHVFDSLKPPSQVELVFYVLSFCKSAVVPLASVSVIPYCLAXVLGQPHKKSL

SEQ ID NO: 64828 - protein, 355 aa, synthetic construct
  REGION 1..355: note = Synthetic
MEEGMNVLHDFGIQSTHYLQVNYQDSQDWFILVSVIADLRNAFYVLFPIWFHLQEAVGIKLLWVAVIGDWLNLVFKWILFGQRPYWWVLDTDYYSNTSVPLIKQFPVTCETGPGSPSGHAMGTAGVYYVMVTSTLSIFQGKIKPTYRFRCLNVILWLGFWAVQLNVCLSRIYLAAHFPHQVVAGVLSGIAVAETFSHIHSIYNASLKKYFLITFFLFSFAIGFYLLLKGLGVDLLWTLEKAQRWCEQPEWVHIDTTPFASLLKNLGTLFGLGLALNSSMYRESCKGKLSKWLPFRLSSIVASLVLLHVFDSLKPPSQVELVFYVLSFCKSAVVPLASVSVIPYCLVLGQPHKKSL

SEQ ID NO: 64829 - protein, 355 aa, synthetic construct
  REGION 1..355: note = Synthetic
MEEGMNVLHDFGIQSTHYLQVNYQDSQDWFILVSVIADLRNAFYVLFPIWFHLQEAVGIKLLWVAVIGDWLNLVFKWILFGQRPYWWVLDTDYYSNTSVPLIKQFPVTCETGPGSPSGHAMGTAGVYYVMVTSTLSIFQGKIKPTYRFRCLNVILWLGFWAVQLNVCLSRIYLAAHFPHQVVAGVLSGIAVAETFSHIHSIYNASLKKYFLITFFLFSFAIGFYLLLKGLGVDLLWTLEKAQRWCEQPEWVHIDTTPFASLLKNLGTLFGLGLALNSSMYRESCKGKLSKWLPFRLSSIVASLVLLHVFDSLKPPSQVELVFYVLSFCKSAVVPLASVSVIPYCLALGQPHKKSL

SEQ ID NO: 64830 - DNA, 94 bp, synthetic construct
  misc_feature 1..94: note = Synthetic
  source 1..94: mol_type = other DNA
agctgccttctgcggggcttgccttctggccatgcccttcttctctcccttgcacctgtacctcttggtctttgaataaagcctgagtaggaag

SEQ ID NO: 64831 - DNA, 110 bp, synthetic construct
  misc_feature 1..110: note = Synthetic
  source 1..110: mol_type = other DNA
gctggagcctcggtggccatgcttcttgccccttgggcctccccccagcccctcctccccttcctgcacccgtacccccgtggtctttgaataaagtctgagtgggcggc

SEQ ID NO: 64832 - DNA, 121 bp, synthetic construct
  misc_feature 1..121: note = Synthetic
  source 1..121: mol_type = other DNA
gagatgtggagtcttcggtgtttaaagtcaacaaccatgccagggattgaggaggactactatttgaagcaatgggcaccaagtgaaataaagtcttgttaattactatattttagatgca

SEQ ID NO: 64833 - DNA, 56 bp, synthetic construct
  misc_feature 1..56: note = Synthetic
  source 1..56: mol_type = other DNA
aataaaggaaatttattttcattgcaatagtgtgttggaattttttgtgtctctca

SEQ ID NO: 64834 - DNA, 120 bp, synthetic construct
  misc_feature 1..120: note = Synthetic
  source 1..120: mol_type = other DNA
ttgtttattgcagcttataatggttacaaataaagcaatagcatcacaaatttcacaaataaagcatttttttcactgcattctagttgtggtttgtccaaactcatcaatgtatcttat

SEQ ID NO: 64835 - DNA, 22 bp, synthetic construct
  misc_feature 1..22: note = Synthetic
  source 1..22: mol_type = other DNA
agagagggcaagggattggacg

SEQ ID NO: 64836 - RNA, 64 nt, synthetic construct
  misc_feature 1..64: note = Synthetic
  modified_base 1: mod_base = um
  modified_base 2: mod_base = OTHER; note = 2'-O-methyl a
  modified_base 3: mod_base = gm
  modified_base 4: mod_base = cm
  modified_base 32..33: mod_base = OTHER; note = 2'-O-methyl a
  modified_base 34: mod_base = cm
  modified_base 35..36: mod_base = um
  modified_base 41..42: mod_base = OTHER; note = 2'-O-methyl a
  modified_base 43: mod_base = gm
  modified_base 44: mod_base = um
  modified_base 44..45: mod_base = gm
  modified_base 47: mod_base = cm
  modified_base 48: mod_base = OTHER; note = 2'-O-methyl a
  modified_base 49..50: mod_base = cm
  modified_base 51: mod_base = gm
  modified_base 52: mod_base = OTHER; note = 2'-O-methyl a
  modified_base 53: mod_base = gm
  modified_base 54: mod_base = um
  modified_base 55: mod_base = cm
  modified_base 56..57: mod_base = gm
  modified_base 58: mod_base = um
  modified_base 59: mod_base = gm
  modified_base 60: mod_base = cm
  modified_base 61: mod_base = other; note = linked by phosphorothioate linkage
  modified_base 61..63: mod_base = um
  modified_base 62..63: mod_base = other; note = linked by phosphorothioate linkage
  modified_base 63..64: mod_base = other; note = linked by phosphorothioate linkage
  source 1..64: mol_type = other RNA
tagcaagttaaaataaggctagtccgttatcaacttgaaaaagtggcaccgagtcggtgctttt

SEQ ID NO: 64837 - RNA, 68 nt, synthetic construct
  misc_feature 1..68: note = chemically synthesized
  modified_base 36..37: mod_base = OTHER; note = 2'-O-methyl a
  modified_base 38: mod_base = cm
  modified_base 39..40: mod_base = um
  modified_base 44..45: mod_base = OTHER; note = 2'-O-methyl a
  modified_base 47: mod_base = gm
  modified_base 48: mod_base = um
  modified_base 49..50: mod_base = gm
  modified_base 51: mod_base = cm
  modified_base 52: mod_base = OTHER; note = 2'-O-methyl a
  modified_base 53..54: mod_base = cm
  modified_base 55: mod_base = gm
  modified_base 57: mod_base = gm
  modified_base 58: mod_base = um
  modified_base 59: mod_base = cm
  modified_base 60..61: mod_base = gm
  modified_base 62: mod_base = um
  modified_base 63: mod_base = gm
  modified_base 64: mod_base = cm
  modified_base 65..66: mod_base = other; note = linked by phosphorothioate linkage
  modified_base 65..67: mod_base = um
  modified_base 66..67: mod_base = other; note = linked by phosphorothioate linkage
  modified_base 67..68: mod_base = other; note = linked by phosphorothioate linkage
  source 1..68: mol_type = other RNA
agcatagcaagttaaaataaggctagtccgttatcaacttgaaaaagtggcaccgagtcggtgctttt
